(19) United States
(12) Patent Application Publication
(10) Pub. No.: US 2019/0216893 A1
(43) Pub. Date: Jul. 18, 2019

(54) COMPOSITIONS AND METHODS OF MODULATING IMMUNE RESPONSE

(71) Applicant: The Scripps Research Institute, La Jolla, CA (US)

(72) Inventor: Benjamin F. Cravatt, La Jolla, CA (US)

(21) Appl. No.: 16/306,362

(22) PCT Filed: Jun. 2, 2017
(86) PCT No.: PCT/US17/35748

§ 371 Date: Nov. 30, 2018

Related U.S. Application Data
(60) Provisional application No. 62/345,715, filed on Jun. 3, 2016.

(51) Int. Cl. A61K 38/17

(52) U.S. Cl. CPC A61K 38/1709

(57) ABSTRACT

Disclosed herein are methods, pharmaceutical compositions, and vaccines for modulating an immune response. Also disclosed, herein are methods, pharmaceutical compositions, and vaccines for inducing an immune response.

### CROSS-REFERENCE

[0001] This application claims the benefit of U.S. Provisional Application No. 62/345,715, filed on Jun. 3, 2016, which is incorporated herein by reference in its entirety.

### SEQUENCE LISTING

[0002] The instant application contains a Sequence Listing which has been submitted electronically in ASCII format and is hereby incorporated by reference in its entirety. Said ASCII copy, created on May 31, 2017, is named 48054-705_601_SL.txt and is 3,856,317 bytes in size.

### BACKGROUND OF THE DISCLOSURE

[0003] The immune system is a complex network of responses and processes that protects an organism and enables the organism to fight against a foreign agent. In some instances, there are two types of immune response when presented with a foreign agent. In one instance, the immune system responds with a B cell-mediated response (e.g., humoral response or antibody-mediated response) when foreign agents (e.g., antigens and/or pathogens) are present in the lymph or blood. In another instance, the immune system responds with a T cell-mediated response (e.g., a cell-mediated response) when cells that display aberrant MHC markers are present. In some instances, both humoral response and cell-mediated response are triggered by a foreign agent when, e.g., both antigens and cells containing aberrant MHC markers are present.

### SUMMARY OF THE DISCLOSURE

[0004] In certain embodiments, disclosed herein include methods, pharmaceutical compositions, and vaccines for modulating an immune response. In some embodiments, included herein are methods of administering a small molecule fragment described herein for modulating an immune response. In additional embodiments, described herein are pharmaceutical compositions and vaccines which comprise a small molecule fragment described herein for modulating an immune response.

[0005] Disclosed herein, in certain embodiments, is a method of modulating an immune response in a subject in need thereof, comprising administering to the subject a therapeutically effective amount of a small molecule fragment of Formula (I):

[chemical structure]

[0006] wherein:
[0007] RM is a reactive moiety selected from a Michael acceptor moiety, a leaving group moiety, or a moiety capable of forming a covalent bond with the thiol group of a cysteine residue; and
[0008] F is a small molecule fragment moiety.

[0009] In some embodiments, the small molecule fragment interacts with an endogenous cysteine-containing polypeptide expressed in the subject to form a cysteine-containing polypeptide-small molecule fragment adduct. In some embodiments, the small molecule fragment is covalently bound to a cysteine residue of the cysteine-containing polypeptide. In some embodiments, the cysteine-containing polypeptide-small molecule fragment adduct induces an immune response. In some embodiments, the cysteine-containing polypeptide-small molecule fragment adduct induces a humoral immune response. In some embodiments, the cysteine-containing polypeptide-small molecule fragment adduct induces a cell-mediated immune response. In some embodiments, the cysteine-containing polypeptide-small molecule fragment adduct increases an immune response relative to a control. In some embodiments, the cysteine-containing polypeptide-small molecule fragment adduct increases a humoral immune response relative to a control. In some embodiments, the cysteine-containing polypeptide-small molecule fragment adduct increases a cell-mediated immune response relative to a control. In some embodiments, the control is the level of an immune response in the subject prior to administration of the small molecule fragment. In some embodiments, the control is the level of an immune response in a subject who has not been exposed to the small molecule fragment. In some embodiments, the control is the level of a humoral immune response or a cell-mediated immune response in the subject prior to administration of the small molecule fragment. In some embodiments, the control is the level of a humoral immune response or a cell-mediated immune response in a subject who has not been exposed to the small molecule fragment. In some embodiments, the cysteine-containing polypeptide is overexpressed in a disease or condition. In some embodiments, the cysteine-containing polypeptide comprises one or more mutations. In some embodiments, the cysteine-containing polypeptide comprising one or more mutations is overexpressed in a disease or condition. In some embodiments, the disease or condition is cancer. In some embodiments, the cysteine-containing polypeptide is a cancer-associated protein. In some embodiments, the cysteine-containing polypeptide is overexpressed in a cancer. In some embodiments, the cysteine-containing polypeptide comprising one or more mutations is overexpressed in a cancer. In some embodiments, the cysteine-containing polypeptide is a non-denatured form of the polypeptide. In some embodiments, the cysteine-containing polypeptide comprises a biologically active cysteine site. In some embodiments, the biologically active cysteine site is a cysteine residue that is located about 10 Å or less to an active-site ligand or residue. In some embodiments, the cysteine residue that is located about 10 Å or less to the active-site ligand or residue is an active site cysteine. In some embodiments, the biologically active cysteine site is an active site cysteine. In some embodiments, the biologically active cysteine site is a cysteine residue that is located greater than 10 Å from an active-site ligand or residue. In some embodiments, the cysteine residue that is located greater than 10 Å from the active-site ligand or residue is a non-active site cysteine. In some embodiments, the biologically active cysteine site is a non-active site cysteine. In some embodiments, the cysteine-containing polypeptide is an enzyme, a transporter, a receptor, a channel protein, an adaptor protein, a chaperone, a signaling protein, a plasma protein, transcription related protein, translation related protein, mitochondrial protein, or cytoskeleton related protein. In some embodiments, the cysteine-containing polypeptide is an enzyme, a transporter, a receptor, a channel protein, an adaptor protein, a chaperone, a signaling protein, transcription related protein, or translation related protein. In some embodiments, the enzyme comprises kinases, proteases, or deubiquitinating enzymes. In some embodiments, the protease is a cysteine protease. In some embodiments, the cysteine protease comprises caspases. In some embodiments, the signaling protein comprises vascular endothelial growth factor. In some embodiments, the signaling protein comprises a redox signaling protein. In some embodiments, the cysteine-containing polypeptide is about 20, 30, 35, 40, 45, 50, 55, 60, 65, 70, 75, 80, 85, 90, 95, 100 amino acid residues in length or more. In some embodiments, the cysteine-containing polypeptide comprises a protein illustrated in Tables 1-5. In some embodiments, the Michael acceptor moiety comprises an alkene or an alkyne moiety. In some embodiments, the covalent bond is formed between a portion of the Michael acceptor moiety on the small molecule fragment and a portion of a cysteine residue of the cysteine-containing polypeptide. In some embodiments, F is obtained from a compound library. In some embodiments, the compound library comprises ChemBridge fragment library, Pyramid Platform Fragment-Based Drug Discovery, Maybridge fragment library, FRGx from AnalytiCon, TCI-Frag from AnCoreX, Bio Building Blocks from ASINEX, BioFocus 3D from Charles River, Fragments of Life (FOL) from Emerald Bio, Enamine Fragment Library, IOTA Diverse 1500, BIONET fragments library, Life Chemicals Fragments Collection, OTAVA fragment library, Prestwick fragment library, Selcia fragment library, TimTec fragment-based library, Allium from Vitas-M Laboratory, or Zenobia fragment library. In some embodiments, F is a small molecule fragment moiety illustrated in FIG. 1 (e.g., FIG. 1A and/or FIG. 1B). In some embodiments, F further comprises a linker moiety that connects F to the carbonyl moiety. In some embodiments, the small molecule fragment is a small molecule fragment illustrated in FIG. 1 (e.g., FIG. 1A and/or FIG. 1B). In some embodiments, the small molecule fragment has a molecular weight of about 150 Dalton or higher. In some embodiments, the small molecular fragment has a molecular weight of about 175, 200, 225, 250, 275, 300, 350, 400, 450, 500, 550, 600, 650, 700, 750, 800, 850, 900, 950, 1000 Dalton, or higher. In some embodiments, the molecular weight of the small molecular fragment is prior to enrichment with a halogen, a nonmetal, or a transition metal. In some embodiments, the small molecular fragment of Formula (I) has a molecular weight of about 150, 175, 200, 225, 250, 275, 300, 350, 400, 450, 500, 550, 600, 650, 700, 750, 800, 850, 900, 950, 1000 Dalton, or higher. In some embodiments, the method further comprises administering a cysteine-containing polypeptide-small molecule fragment adduct. In some embodiments, the cysteine-containing polypeptide is at most 50 amino acid residues in length. In some embodiments, the cysteine-containing polypeptide comprises an isolated and purified polypeptide comprising at least 80%, 85%, 90%, 95%, 96%, 97%, 98%, or 99% sequence identity to at least seven contiguous amino acids of an amino acid sequence selected from SEQ ID NOs: 1-9655. In some embodiments, the method further comprises administration of an adjuvant. In some embodiments, the small molecule fragment is formulated for parenteral, oral, or intranasal administration. In some embodiments, the subject is a human.

[0010] Disclosed herein, in certain embodiments, is a vaccine comprising a small molecule fragment of Formula (I):

[chemical structure]

[0011] wherein:
[0012] RM is a reactive moiety selected from a Michael acceptor moiety, a leaving group moiety, or a moiety capable of forming a covalent bond with the thiol group of a cysteine residue; and
[0013] F is a small molecule fragment moiety.

[0014] In some embodiments, the small molecule fragment interacts with a cysteine-containing polypeptide to form a cysteine-containing polypeptide-small molecule fragment adduct. In some embodiments, the small molecule fragment is covalently bond to a cysteine residue of the cysteine-containing polypeptide. In some embodiments, the cysteine-containing polypeptide is an endogenous cysteine-containing polypeptide expressed in a subject. In some embodiments, administration of the small molecule fragment induces an immune response. In some embodiments, administration of the small molecule fragment induces a humoral immune response. In some embodiments, administration of the small molecule fragment induces a cell-mediated immune response. In some embodiments, administration of the small molecule fragment increases an immune response relative to a control. In some embodiments, administration of the small molecule fragment increases a humoral immune response relative to a control. In some embodiments, administration of the small molecule fragment increases a cell-mediated immune response relative to a control. In some embodiments, the control is the level of an immune response in the subject prior to administration of the small molecule fragment. In some embodiments, the control is the level of an immune response in a subject who has not been exposed to the small molecule fragment. In some embodiments, the control is the level of a humoral immune response or a cell-mediated immune response in the subject prior to administration of the small molecule fragment. In some embodiments, the control is the level of a humoral immune response or a cell-mediated immune response in a subject who has not been exposed to the small molecule fragment. In some embodiments, the cysteine-containing polypeptide is overexpressed in a disease or condition. In some embodiments, the cysteine-containing polypeptide comprises one or more mutations. In some embodiments, the cysteine-containing polypeptide comprising one or more mutations is overexpressed in a disease or condition. In some embodiments, the disease or condition is cancer. In some embodiments, the cysteine-containing polypeptide is a cancer-associated protein. In some embodiments, the cysteine-containing polypeptide is overexpressed in a cancer. In some embodiments, the cysteine-containing polypeptide comprising one or more mutations is overexpressed in a cancer. In some embodiments, the cysteine-containing polypeptide is a non-denatured form of the polypeptide. In some embodiments, the cysteine-containing polypeptide is an enzyme, a transporter, a receptor, a channel protein, an adaptor protein, a chaperone, a signaling protein, a plasma protein, transcription related protein, translation related protein, mitochondrial protein, or cytoskeleton related protein. In some embodiments, the cysteine-containing polypeptide comprises a protein illustrated in Tables 1-5. In some embodiments, the Michael acceptor moiety comprises an alkene or an alkyne moiety. In some embodiments, the covalent bond is formed between a portion of the Michael acceptor moiety on the small molecule fragment and a portion of a cysteine residue of the cysteine-containing polypeptide. In some embodiments, F is obtained from a compound library. In some embodiments, the compound library comprises ChemBridge fragment library, Pyramid Platform Fragment-Based Drug Discovery, Maybridge fragment library, FRGx from AnalytiCon, TCI-Frag from AnCoreX, Bio Building Blocks from ASINEX, BioFocus 3D from Charles River, Fragments of Life (FOL) from Emerald Bio, Enamine Fragment Library, IOTA Diverse 1500, BIONET fragments library, Life Chemicals Fragments Collection, OTAVA fragment library, Prestwick fragment library, Selcia fragment library, TimTec fragment-based library, Allium from Vitas-M Laboratory, or Zenobia fragment library. In some embodiments, F is a small molecule fragment moiety illustrated in FIG. 1 (e.g., FIG. 1A and/or FIG. 1B). In some embodiments, F further comprises a linker moiety that connects F to the carbonyl moiety. In some embodiments, the small molecule fragment is a small molecule fragment illustrated in FIG. 1 (e.g., FIG. 1A and/or FIG. 1B). In some embodiments, the small molecule fragment has a molecular weight of about 150 Dalton or higher. In some embodiments, the small molecular fragment has a molecular weight of about 175, 200, 225, 250, 275, 300, 350, 400, 450, 500, 550, 600, 650, 700, 750, 800, 850, 900, 950, 1000 Dalton, or higher. In some embodiments, the molecular weight of the small molecular fragment is prior to enrichment with a halogen, a nonmetal, or a transition metal. In some embodiments, the small molecular fragment of Formula (I) has a molecular weight of about 150, 175, 200, 225, 250, 275, 300, 350, 400, 450, 500, 550, 600, 650, 700, 750, 800, 850, 900, 950, 1000 Dalton, or higher. In some embodiments, the vaccine further comprises a cysteine-containing polypeptide-small molecule fragment adduct. In some embodiments, the cysteine-containing polypeptide comprises an isolated and purified polypeptide comprising at least 80%, 85%, 90%, 95%, 96%, 97%, 98%, or 99% sequence identity to at least seven contiguous amino acids of an amino acid sequence selected from SEQ ID NOs: 1-9655. In some embodiments, the vaccine further comprises an adjuvant. In some embodiments, the vaccine is formulated for parenteral, oral, or intranasal administration.

[0015] Disclosed herein, in certain embodiments, is a pharmaceutical composition comprising:
[0016] a) a cysteine-containing polypeptide covalently bond to a small molecule fragment, wherein the small molecule fragment is a small molecule fragment of Formula (I):

[chemical structure]

[0017] wherein:
[0018] RM is a reactive moiety selected from a Michael acceptor moiety, a leaving group moiety, or a moiety capable of forming a covalent bond with the thiol group of a cysteine residue; and
[0019] F is a small molecule fragment moiety; and wherein the small molecule fragment is covalently bond to a cysteine residue of the cysteine-containing polypeptide; and
[0020] b) an excipient.

[0021] In some embodiments, the cysteine-containing polypeptide is a non-denatured form of the polypeptide. In some embodiments, the cysteine-containing polypeptide comprises a biologically active cysteine site. In some embodiments, the biologically active cysteine site is a cysteine residue that is located about 10 Å or less to an active-site ligand or residue. In some embodiments, the cysteine residue that is located about 10 Å or less to the active-site ligand or residue is an active site cysteine. In some embodiments, the biologically active cysteine site is an active site cysteine. In some embodiments, the biologically active cysteine site is a cysteine residue that is located greater than 10 Å from an active-site ligand or residue. In some embodiments, the cysteine residue that is located greater than 10 Å from the active-site ligand or residue is a non-active site cysteine. In some embodiments, the biologically active cysteine site is a non-active site cysteine. In some embodiments, the cysteine-containing polypeptide is an enzyme, a transporter, a receptor, a channel protein, an adaptor protein, a chaperone, a signaling protein, a plasma protein, transcription related protein, translation related protein, mitochondrial protein, or cytoskeleton related protein. In some embodiments, the cysteine-containing polypeptide is an enzyme, a transporter, a receptor, a channel protein, an adaptor protein, a chaperone, a signaling protein, transcription related protein, or translation related protein. In some embodiments, the enzyme comprises kinases, proteases, or deubiquitinating enzymes. In some embodiments, the protease is a cysteine protease. In some embodiments, the cysteine protease comprises caspases. In some embodiments, the signaling protein comprises vascular endothelial growth factor. In some embodiments, the signaling protein comprises a redox signaling protein. In some embodiments, the cysteine-containing polypeptide is about 20, 30, 35, 40, 45, 50, 55, 60, 65, 70, 75, 80, 85, 90, 95, 100 amino acid residues in length or more. In some embodiments, the cysteine-containing polypeptide comprises a protein illustrated in Tables 1-5. In some embodiments, the cysteine-containing polypeptide comprises an isolated and purified protein. In some embodiments, the isolated and purified protein is a protein illustrated in Tables 1-5. In some embodiments, the cysteine-containing polypeptide is at most 50 amino acid residues in length. In some embodiments, the cysteine-containing polypeptide comprises an isolated and purified polypeptide comprising at least 80% sequence identity to at least seven contiguous amino acids of an amino acid sequence selected from SEQ ID NOs: 1-9655. In some embodiments, the cysteine-containing polypeptide comprises an isolated and purified polypeptide comprising at least 85% sequence identity to at least seven contiguous amino acids of an amino acid sequence selected from SEQ ID NOs: 1-9655. In some embodiments, the cysteine-containing polypeptide comprises an isolated and purified polypeptide comprising at least 90% sequence identity to at least seven contiguous amino acids of an amino acid sequence selected from SEQ ID NOs: 1-9655. In some embodiments, the cysteine-containing polypeptide comprises an isolated and purified polypeptide comprising at least 95% sequence identity to at least seven contiguous amino acids of an amino acid sequence selected from SEQ ID NOs: 1-9655. In some embodiments, the cysteine-containing polypeptide comprises an isolated and purified polypeptide comprising at least 96% sequence identity to at least seven contiguous amino acids of an amino acid sequence selected from SEQ ID NOs: 1-9655. In some embodiments, the cysteine-containing polypeptide comprises an isolated and purified polypeptide comprising at least 97% sequence identity to at least seven contiguous amino acids of an amino acid sequence selected from SEQ ID NOs: 1-9655. In some embodiments, the cysteine-containing polypeptide comprises an isolated and purified polypeptide comprising at least 98% sequence identity to at least seven contiguous amino acids of an amino acid sequence selected from SEQ ID NOs: 1-9655. In some embodiments, the cysteine-containing polypeptide comprises an isolated and purified polypeptide comprising at least 99% sequence identity to at least seven contiguous amino acids of an amino acid sequence selected from SEQ ID NOs: 1-9655. In some embodiments, the cysteine-containing polypeptide comprises an isolated and purified polypeptide comprising 100% sequence identity to at least seven contiguous amino acids of an amino acid sequence selected from SEQ ID NOs: 1-9655. In some embodiments, the cysteine-containing polypeptide comprises an isolated and purified polypeptide consisting of 100% sequence identity to at least seven contiguous amino acids of an amino acid sequence selected from SEQ ID NOs: 1-9655. In some embodiments, the Michael acceptor moiety comprises an alkene or an alkyne moiety. In some embodiments, the covalent bond is formed between a portion of the Michael acceptor moiety on the small molecule fragment and a portion of a cysteine residue of the cysteine-containing polypeptide. In some embodiments, F is obtained from a compound library. In some embodiments, the compound library comprises ChemBridge fragment library, Pyramid Platform Fragment-Based Drug Discovery, Maybridge fragment library, FRGx from AnalytiCon, TCI-Frag from AnCoreX, Bio Building Blocks from ASINEX, BioFocus 3D from Charles River, Fragments of Life (FOL) from Emerald Bio, Enamine Fragment Library, IOTA Diverse 1500, BIONET fragments library, Life Chemicals Fragments Collection, OTAVA fragment library, Prestwick fragment library, Selcia fragment library, TimTec fragment-based library, Allium from Vitas-M Laboratory, or Zenobia fragment library. In some embodiments, F is a small molecule fragment moiety illustrated in FIG. 1 (e.g., FIG. 1A and/or FIG. 1B). In some embodiments, F further comprises a linker moiety that connects F to the carbonyl moiety. In some embodiments, the small molecule fragment is a small molecule fragment illustrated in FIG. 1 (e.g., FIG. 1A and/or FIG. 1B). In some embodiments, the small molecule fragment has a molecular weight of about 150 Dalton or higher. In some embodiments, the small molecular fragment has a molecular weight of about 175, 200, 225, 250, 275, 300, 350, 400, 450, 500, 550, 600, 650, 700, 750, 800, 850, 900, 950, 1000 Dalton, or higher. In some embodiments, the molecular weight of the small molecular fragment is prior to enrichment with a halogen, a nonmetal, or a transition metal. In some embodiments, the small molecular fragment of Formula (I) has a molecular weight of about 150, 175, 200, 225, 250, 275, 300, 350, 400, 450, 500, 550, 600, 650, 700, 750, 800, 850, 900, 950, 1000 Dalton, or higher. In some embodiments, the pharmaceutical composition is formulated for parenteral, oral, or intranasal administration.

[0022] Disclosed herein, in certain embodiments, is a vaccine comprising a pharmaceutical composition disclosed above. In some embodiments, the vaccine further comprises an adjuvant. In some embodiments, the vaccine is formulated for parenteral, oral, or intranasal administration.

[0023] Disclosed herein, in certain embodiments, is an isolated and purified antibody or its binding fragment thereof comprising a heavy chain CDR1, CDR2 and CDR3 sequence and a light chain CDR1, CDR2, and CDR3 sequence, wherein the heavy chain and light chain CDRs interact with a cysteine-containing polypeptide that is covalently bond to a small molecule fragment, wherein the small molecule fragment is a small molecule fragment of Formula (I):

[chemical structure]

wherein:
[0024] RM is a reactive moiety selected from a Michael acceptor moiety, a leaving group moiety, or a moiety capable of forming a covalent bond with the thiol group of a cysteine residue; and
[0025] wherein the small molecule fragment is covalently bond to a cysteine residue of the cysteine-containing polypeptide.

[0026] In some embodiments, the antibody or its binding fragment thereof comprises a humanized antibody or binding fragment thereof, chimeric antibody or binding fragment thereof, monoclonal antibody or binding fragment thereof, monovalent Fab′, divalent Fab2, single-chain variable fragment (scFv), diabody, minibody, nanobody, single-domain antibody (sdAb), camelid antibody, or binding fragment thereof.

[0027] Disclosed herein, in certain embodiments, is a kit comprising a pharmaceutical composition described above.

[0028] Disclosed herein, in certain embodiments, is a kit comprising an isolated and purified antibody or its binding fragment thereof disclosed above.

### BRIEF DESCRIPTION OF THE DRAWINGS

[0029] Various aspects of the disclosure are set forth with particularity in the appended claims. A better understanding of the features and advantages of the present disclosure will be obtained by reference to the following detailed description that sets forth illustrative embodiments, in which the principles of the disclosure are utilized, and the accompanying drawings of which:

[0030] FIG. 1A-FIG. 1B illustrate exemplary small molecule fragments described herein.

### DETAILED DESCRIPTION OF THE DISCLOSURE

[0031] Cysteine containing proteins encompass a large repertoire of proteins that participate in numerous cellular functions such as mitogenesis, proliferation, apoptosis, gene regulation, and proteolysis. These proteins include enzymes, transporters, receptors, channel proteins, adaptor proteins, chaperones, signaling proteins, plasma proteins, transcription related proteins, translation related proteins, mitochondrial proteins, or cytoskeleton related proteins. Dysregulated expression of a cysteine containing protein, in many cases, is associated with or modulates a disease, for example, such as cancer.

[0032] In some instances, small molecule compounds are capable of eliciting an immune response. In some instances, these small molecule compounds are referred to as haptens. In some cases, a hapten is a non-immunogenic compound but becomes immunogenic when it interacts with a carrier molecule such as a protein. For example, upon administration of a small molecule hapten, the hapten forms an adduct with a protein of interest in a process refers to as haptenization. In some cases, the protein-hapten adduct becomes antigenically active and enables priming of T cells and B cells, thereby directing immune response to a cell that expresses the protein of interest.

[0033] In some embodiments, disclosed herein are small molecule fragments that elicit an immune response upon interaction with cysteine-containing proteins (or cysteine-containing polypeptides). In some instances, also disclosed herein includes use of a small molecule fragment described herein to elicit or modulate an immune response in a subject. In such instances, the small molecule fragment forms an adduct with an endogenous cysteine-containing protein, and subsequently directs immune response to the cell that expresses the endogenous cysteine-containing protein. In some instances, the cell that expresses the endogenous cysteine-containing protein is a disease cell (e.g., a cancerous cell). In some instances, the endogenous cysteine-containing protein is present only in a diseased cell (e.g., a cancerous cell). In other instances, the endogenous cysteine-containing protein is overexpressed in a diseased cell (e.g., a cancerous cell) and/or comprises one or more mutations in a diseased cell (e.g., a cancerous cell).

[0034] In some embodiments, also disclosed herein are vaccines and pharmaceutical compositions that comprise one or more small molecule fragments described herein. In some instances, additionally descried herein are vaccines and pharmaceutical compositions that comprise one or more cysteine-containing polypeptide-small molecule fragment adducts or antibodies that recognize a cysteine-containing polypeptide-small molecule fragment adduct described herein.

[0035] In additional embodiments, described herein include kits for use with any of the methods, vaccines, and pharmaceutical compositions disclosed herein.

### Small Molecule Fragments

[0036] In some embodiments, described herein include pharmaceutical compositions, vaccines, and methods of use of a small molecule fragment. In some embodiments, a small molecule fragment described herein comprises a non-naturally occurring molecule. In some instances, the non-naturally occurring molecule does not include a natural and/or non-natural peptide fragment, or a small molecule that is produced naturally within the body of a mammal.

[0037] In some embodiments, a small molecule fragment described herein comprises a molecular weight of about 100 Dalton or higher. In some embodiments, a small molecule fragment comprises a molecular weight of about 120, 130, 140, 150, 160, 170, 180, 190, 200, 210, 220, 230, 240, 250, 260, 270, 280, 290, 300, 310, 320, 330, 340, 350, 360, 370, 380, 390, 400, 410, 420, 430, 440, 450, 500, 550, 600, 650, 700, 750, 800, 850, 900, 950, 1000 Dalton, or higher. In some instances, the molecular weight of a small molecule fragment is between about 150 and about 500, about 150 and about 450, abut 150 and about 440, about 150 and about 430, about 150 and about 400, about 150 and about 350, about 150 and about 300, about 150 and about 250, about 170 and about 500, about 180 and about 450, about 190 and about 400, about 200 and about 350, about 130 and about 300, or about 120 and about 250 Dalton.

[0038] In some embodiments, the molecular weight of a small molecule fragment described herein is the molecular weight prior to enrichment with one or more elements selected from a halogen, a nonmetal, a transition metal, or a combination thereof. In some embodiments, the molecular weight of a small molecule fragment described herein is the molecular weight prior to enrichment with a halogen. In some embodiments, the molecular weight of a small molecule fragment described herein is the molecular weight prior to enrichment with a nonmetal. In some embodiments, the molecular weight of a small molecule fragment described herein is the molecular weight prior to enrichment with a transition metal.

[0039] In some embodiments, a small molecule fragment described herein comprises micromolar or millimolar binding affinity. In some instances, a small molecule fragment comprises a binding affinity of about 1 μM, 10 μM, 100 μM, 500 μM, 1 mM, 10 mM, or higher.

[0040] In some embodiments, a small molecule fragment described herein has a high ligand efficiency (LE). Ligand efficiency is the measurement of the binding energy per atom of a ligand to its binding partner. In some instances, the ligand efficiency is defined as the ratio of the Gibbs free energy (ΔG) to the number of non-hydrogen atoms of the compound (N):

LE=(ΔG)/N.

[0041] In some cases, LE is also arranged as:

LE=1.4(−log IC₅₀)/N.

[0042] In some instances, the LE score is about 0.3 kcal mol⁻¹ HA⁻¹, about 0.35 kcal mol⁻¹ HA⁻¹, about 0.4 kcal mol⁻¹ HA⁻¹, or higher.

[0043] In some embodiments, a small molecule fragment described herein is designed based on the Rule of 3. In some embodiments, the Rule of 3 comprises a non-polar solvent-polar solvent (e.g. octanol-water) partition coefficient log P of about 3 or less, a molecular mass of about 300 Daltons or less, about 3 hydrogen bond donors or less, about 3 hydrogen bond acceptors or less, and about 3 rotatable bonds or less.

[0044] In some embodiments, a small molecule fragment described herein comprises three cyclic rings or less.

[0045] In some embodiments, a small molecule fragment described herein binds to a cysteine residue of a polypeptide that is about 20 amino acid residues in length or more. In some instances, a small molecule fragment described herein binds to a cysteine residue of a polypeptide that is about 30, 35, 40, 45, 50, 55, 60, 65, 70, 75, 80, 85, 90, 95, 100 amino acid residues in length or more.

[0046] In some embodiments, a small molecule fragment described herein further comprises pharmacokinetic parameters that are unsuitable as a therapeutic agent for administration without further optimization of the small molecule fragments. In some instances, the pharmacokinetic parameters that are suitable as a therapeutic agent comprise parameters in accordance with FDA guideline, or in accordance with a guideline from an equivalent Food and Drug Administration outside of the United States. In some instances, the pharmacokinetic parameters comprise the peak plasma concentration (Cmax), the lowest concentration of a therapeutic agent (Cmin), volume of distribution, time to reach Cmax, elimination half-life, clearance, and the life. In some embodiments, the pharmacokinetic parameters of the small molecule fragments are outside of the parameters set by the FDA guideline, or by an equivalent Food and Drug Administration outside of the United States. In some instances, a skilled artisan understands, in view of the pharmacokinetic parameters of the small molecule fragments described herein, that these small molecule fragments are unsuited as therapeutic agents without further optimization.

[0047] In some embodiments, a small molecule fragment described herein comprises a reactive moiety which forms a covalent interaction with the thiol group of a cysteine residue of a cysteine-containing protein, and an affinity handle moiety.

[0048] In some instances, a small molecule fragment described herein is a small molecule fragment of Formula (I):

[chemical structure]

[0049] wherein:
[0050] RM is a reactive moiety selected from a Michael acceptor moiety, a leaving group moiety, or a moiety capable of forming a covalent bond with the thiol group of a cysteine residue; and F is a small molecule fragment moiety.

[0051] In some instances, the Michael acceptor moiety comprises an alkene or an alkyne moiety. In some cases, F is obtained from a compound library. In some cases, the compound library comprises ChemBridge fragment library, Pyramid Platform Fragment-Based Drug Discovery, Maybridge fragment library, FRGx from AnalytiCon, TCI-Frag from AnCoreX, Bio Building Blocks from ASINEX, BioFocus 3D from Charles River, Fragments of Life (FOL) from Emerald Bio, Enamine Fragment Library, IOTA Diverse 1500, BIONET fragments library, Life Chemicals Fragments Collection, OTAVA fragment library, Prestwick fragment library, Selcia fragment library, TimTec fragment-based library, Allium from Vitas-M Laboratory, or Zenobia fragment library.

[0052] In some embodiments, a small molecule fragment of Formula (I) selectively interact with one or more protein variants. In some instances for example, a small molecule fragment of Formula (I) interacts or binds to the wild-type protein but does not bind to a mutant form of the protein. Conversely, in some instances, a small molecule fragment of Formula (I) interacts or binds to one specific protein mutant but does not interact with either the wild-type or the same protein comprising a different mutation. As used herein, the term “variant” comprises mutations within the protein sequence, additions or deletions of the protein sequence, and/or termini truncations. As used herein, the term “variant” comprises a protein having different conformations, for example, an active conformation or an inactive conformation. In some instances, a small molecule fragment of Formula (I) interacts with about 1, 2, 3, 4, 5, or more different variants of a protein of interest. In additional instances, a small molecule fragment of Formula (I) interacts with about 1 variant of a protein of interest. In additional instances, a small molecule fragment of Formula (I) interacts with about 2 variants of a protein of interest. In additional instances, a small molecule fragment of Formula (I) interacts with about 3 variants of a protein of interest. In additional instances, a small molecule fragment of Formula (I) interacts with about 4 variants of a protein of interest. In additional instances, a small molecule fragment of Formula (I) interacts with about 5 variants of a protein of interest.

[0053] In some embodiments, a small molecule fragment of Formula (I) does not contain a second binding site. In some instances, a small molecule fragment moiety does not bind to the protein. In some cases, a small molecule fragment moiety does not covalently bind to the protein. In some instances, a small molecule fragment moiety does not interact with a secondary binding site on the protein. In some instances, the secondary binding site is an active site such as an ATP binding site. In some cases, the active site is at least about 10, 15, 20, 25, 35, 40 Å, or more away from the biologically active cysteine residue. In some instances, the small molecule fragment moiety does not interact with an active site such as an ATP binding site.

[0054] In some instances, F is a small molecule fragment moiety illustrated in FIG. 1 (e.g., FIG. 1A and/or FIG. 1B). In some instances, F is a small molecule fragment moiety illustrated in FIG. 1A. In some cases, F further comprises a linker moiety that connects F to the carbonyl moiety. In some cases, the small molecule fragment is a small molecule fragment illustrated in FIG. 1 (e.g., FIG. 1A and/or FIG. 1B).

[0055] In some instances, F is a small molecule fragment moiety selected from: N-(4-bromophenyl)-N-phenylacrylamide, N-(1-benzoylpiperidin-4-yl)-2-chloro-N-phenylacetamide, 1-(4-benzylpiperidin-1-yl)-2-chloroethan-1-one, N-(2-(1H-indol-3-yl)ethyl)-2-chloroacetamide, N-(3,5-bis(trifluoromethyl)phenyl)acrylamide, N-(4-phenoxy-3-(trifluoromethyl)phenyl)-N-(pyridin-3-ylmethyl)acrylamide, N-(3,5-bis(trifluoromethyl)phenyl)acetamide, 2-chloro-1-(4-(hydroxydiphenylmethyl)piperidin-1-yl)ethan-1-one, (E)-3-(3,5-bis(trifluoromethyl)phenyl)-2-cyanoacrylamide, N-(3,5-bis(trifluoromethyl)phenyl)-2-bromopropanamide, N-(3,5-bis(trifluoromethyl)phenyl)-2-chloropropanamide, N-(3,5-bis(trifluoromethyl)phenyl)-N-(pyridin-3-ylmethyl)acrylamide, 3-(2-chloroacetamido)-5-(trifluoromethyl)benzoic acid, I-(4-(5-fluorobenzisoxazol-3-yl)piperidin-1-yl)prop-2-en-1-one, tert-butyl 4-(4-acrylamido-2,6-difluorophenyl)piperazine-1-carboxylate, N-(4-bromo-2,5-dimethylphenyl)acrylamide, 2-chloroacetamido-2-deoxy-α/β-D-glucopyranose, 2-chloro-1-(2-methyl-3,4-dihydroquinolin-1 (2H)-yl)ethan-1-one, N-cyclohexyl-N-phenylacrylamide, 1-(5-bromoindolin-1-yl)prop-2-en-1-one, N-(1-benzylpiperidin-4-yl)-N-phenylacrylamide, 2-chloro-N-(2-methyl-5-(trifluoromethyl)phenyl)acetamide, 1-(5-bromoindolin-1-yl)-2-chloroethan-1-one, 2-chloro-N-(quinolin-5-yl)acetamide, 1-(4-benzylpiperidin-1-yl)prop-2-en-1-one, 2-chloro-N-((3-hydroxy-5-(hydroxymethyl)-2-methylpyridin-4-yl)methyl)acetamide, or 1-(6,7-dimethoxy-3,4-dihydroisoquinolin-2(1H)-yl)prop-2-en-1-one.

[0056] In some embodiments, the small molecule fragment of Formula (I) comprise a molecular weight of about 100, 120, 130, 140, 150, 160, 170, 180, 190, 200, 210, 220, 230, 240, 250, 260, 270, 280, 290, 300, 310, 320, 330, 340, 350, 360, 370, 380, 390, 400, 410, 420, 430, 440, 450, 500, 550, 600, 650, 700, 750, 800, 850, 900, 950, 1000 Dalton, or higher. In some instances, the molecular weight of the small molecule fragment of Formula (I) is between about 150 and about 500, about 150 and about 450, abut 150 and about 440, about 150 and about 430, about 150 and about 400, about 150 and about 350, about 150 and about 300, about 150 and about 250, about 170 and about 500, about 180 and about 450, about 190 and about 400, about 200 and about 350, about 130 and about 300, or about 120 and about 250 Dalton.

[0057] In some embodiments, the molecular weight of the small molecule fragment of Formula (I) is the molecular weight prior to enrichment with one or more elements selected from a halogen, a nonmetal, a transition metal, or a combination thereof. In some embodiments, the molecular weight of the small molecule fragment of Formula (I) is the molecular weight prior to enrichment with a halogen. In some embodiments, the molecular weight of the small molecule fragment of Formula (I) is the molecular weight prior to enrichment with a nonmetal. In some embodiments, the molecular weight of the small molecule fragment of Formula (I) is the molecular weight prior to enrichment with a transition metal.

[0058] In some instances, the small molecule fragment of Formula (I) comprises micromolar or millimolar binding affinity. In some instances, the small molecule fragment of Formula (I) comprises a binding affinity of about 1 μM, 10 μM, 10 μM, 500 μM, 1 mM, 10 mM, or higher.

[0059] In some cases, the small molecule fragment of Formula (I) has a LE score about 0.3 kcal mol⁻¹ HA⁻¹, about 0.35 kcal mol⁻¹ HA⁻¹, about 0.4 kcal mol⁻¹ HA⁻¹, or higher

[0060] In some embodiments, the small molecule fragment of Formula (I) follows the design parameters of Rule of 3. In some instances, the small molecule fragment of Formula (I) has a non-polar solvent-polar solvent (e.g. octanol-water) partition coefficient log P of about 3 or less, a molecular mass of about 300 Daltons or less, about 3 hydrogen bond donors or less, about 3 hydrogen bond acceptors or less, and about 3 rotatable bonds or less.

[0061] In some embodiments, the small molecule fragment of Formula (I) comprises three cyclic rings or less.

[0062] In some embodiments, the small molecule fragment of Formula (I) binds to a cysteine residue of a polypeptide (e.g., a cysteine-containing protein) that is about 20 amino acid residues in length or more. In some instances, the small molecule fragments described herein binds to a cysteine residue of a polypeptide (e.g., a cysteine-containing protein) that is about 30, 35, 40, 45, 50, 55, 60, 65, 70, 75, 80, 85, 90, 95, 100 amino acid residues in length or more.

[0063] In some instances, the small molecule fragment of Formula (I) has pharmacokinetic parameters outside of the parameters set by the FDA guideline, or by an equivalent Food and Drug Administration outside of the United States. In some instances, a skilled artisan understands in view of the pharmacokinetic parameters of the small molecule fragment of Formula (I) described herein that these small molecule fragment is unsuited as a therapeutic agent without further optimization.

### Cysteine-Containing Proteins

[0064] In some embodiments, disclosed herein include a cysteine-containing polypeptide. In some instances, the cysteine-containing polypeptide is about 20, 30, 35, 40, 45, 50, 55, 60, 65, 70, 75, 80, 85, 90, 95, 100 amino acid residues in length or more. In some instances, the cysteine-containing polypeptide is a cysteine-containing protein or its fragment thereof. In some instances, the cysteine-containing protein is a soluble protein or its fragment thereof, or a membrane protein or its fragment thereof. In some instances, the cysteine-containing protein is involved in one or more of a biological process such as protein transport, lipid metabolism, apoptosis, transcription, electron transport, mRNA processing, or host-virus interaction. In some instances, the cysteine-containing protein is associated with one or more of diseases such as cancer or one or more disorders or conditions such as immune, metabolic, developmental, reproductive, neurological, psychiatric, renal, cardiovascular, or hematological disorders or conditions.

[0065] In some embodiments, the cysteine-containing protein comprises a biologically active cysteine residue. In some embodiments, the cysteine-containing protein comprises one or more cysteines in which at least one cysteine is a biologically active cysteine residue. In some cases, the biologically active cysteine site is a cysteine residue that is located about 10 Å or less to an active-site ligand or residue. In some cases, the cysteine residue that is located about 10 Å or less to the active-site ligand or residue is an active site cysteine. In other cases, the biologically active cysteine site is a cysteine residue that is located greater than 10 Å from an active-site ligand or residue. In some instances, the cysteine residue is located greater than 12 Å, 15 Å, 20 Å, 25 Å, 30 Å, 35 Å, 40 Å, 45 Å, or greater than 50 Å from an active-site ligand or residue. In some cases, the cysteine residue that is located greater than 10 Å from the active-site ligand or residue is a non-active site cysteine. In additional cases, the cysteine-containing protein exists in an active form, or in a pro-active form.

[0066] In some embodiments, the cysteine-containing protein comprises one or more functions of an enzyme, a transporter, a receptor, a channel protein, an adaptor protein, a chaperone, a signaling protein, a plasma protein, transcription related protein, translation related protein, mitochondrial protein, or cytoskeleton related protein. In some embodiments, the cysteine-containing protein is an enzyme, a transporter, a receptor, a channel protein, an adaptor protein, a chaperone, a signaling protein, a plasma protein, transcription related protein, translation related protein, mitochondrial protein, or cytoskeleton related protein. In some instances, the cysteine-containing protein has an uncategorized function.

[0067] In some embodiments, the cysteine-containing protein is an enzyme. An enzyme is a protein molecule that accelerates or catalyzes chemical reaction. In some embodiments, non-limiting examples of enzymes include kinases, proteases, or deubiquitinating enzymes.

[0068] In some instances, exemplary kinases include tyrosine kinases such as the TEC family of kinases such as Tee, Bruton's tyrosine kinase (Btk), interleukin-2-inducible T-cell kinase (Itk) (or Emt/Tsk), Bmx, and Txk/Rlk; spleen tyrosine kinase (Syk) family such as SYK and Zeta-chain-associated protein kinase 70 (ZAP-70); Src kinases such as Src, Yes, Fyn, Fgr, Lck, Hck, Blk, Lyn, and Frk; JAK kinases such as Janus kinase 1 (JAK1), Janus kinase 2 (JAK2), Janus kinase 3 (JAK3), and Tyrosine kinase 2 (TYK2); or ErbB family of kinases such as Her1 (EGFR, ErbB1), Her2 (Neu, ErbB2), Her3 (ErbB3), and Her4 (ErbB4).

[0069] In some embodiments, the cysteine-containing protein is a protease. In some embodiments, the protease is a cysteine protease. In some cases, the cysteine protease is a caspase. In some instances, the caspase is an initiator (apical) caspase. In some instances, the caspase is an effector (executioner) caspase. Exemplary caspase includes CASP2, CASP8, CASP9, CASP10, CASP3, CASP6, CASP7, CASP4, and CASP5. In some instances, the cysteine protease is a cathepsin. Exemplary cathepsin includes Cathepsin B, Cathepsin C, CathepsinF, Cathepsin H, Cathepsin K, Cathepsin L1, Cathepsin L2, Cathepsin O, Cathepsin S, Cathepsin W, or Cathepsin Z.

[0070] In some embodiments, the cysteine-containing protein is a deubiquitinating enzyme (DUB). In some embodiments, exemplary deubiquitinating enzymes include cysteine proteases DUBs or metalloproteases. Exemplary cysteine protease DUBs include ubiquitin-specific protease (USP/UBP) such as USP1, USP2, USP3, USP4, USP5, USP6, USP7, USP8, USP9X, USP9Y, USP10, USP11, USP12, USP13, USP14, USP15, USP16, USP17, USP17L2, USP17L3, USP17L4, USP17L5, USP17L7, USP17L8, USP18, USP19, USP20, USP21, USP22, USP23, USP24, USP25, USP26, USP27X, USP28, USP29, USP30, USP31, USP32, USP33, USP34, USP35, USP36, USP37, USP38, USP39, USP40, USP41, USP42, USP43, USP44, USP45, or USP46; ovarian tumor (OTU) proteases such as OTUB1 and OTUB2; Machado-Josephin domain (MJD) proteases such as ATXN3 and ATXN3L; and ubiquitin C-terminal hydrolase (UCH) proteases such as BAP1, UCHL1, UCHL3, and UCHL5. Exemplary metalloproteases include the Jab1/Mov34/Mpr1 Pad1 N-terminal+ (MPN+) (JAMM) domain proteases.

[0071] In some embodiments, exemplary cysteine-containing proteins as enzymes include, but are not limited to, Glyceraldehyde-3-phosphate dehydrogenase (GAPDH), Protein arginine N-methyltransferase 1 (PRMT1), Peptidyl-prolyl cis-trans isomerase NIMA-interaction (PIN1), Acetyl-CoA acetyltransferase (mitochondrial) (ACAT1), Glutathione S-transferase P (GSTP1), Elongation factor 2 (EEF2), Glutathione S-transferase omega-1 (GSTO1), Acetyl-CoA acetyltransferase (mitochondrial) (ACAT1), Protein disulfide-isomerase A4 (PDIA4), Prostaglandin E synthase 3 (PTGES3), Adenosine kinase (ADK), Elongation factor 2 (EEF2), Isoamyl acetate-hydrolyzing esterase 1 homolog (IAH1), Peroxiredoxin-5 (mitochondrial) (PRDX5), Inosine-5-monophosphate dehydrogenase 2 (IMPDH2), 3-hydroxyacyl-CoA dehydrogenase type-2 (HSDI7B10), Omega-amidase NIT2 (NIT2), Aldose reductase (AKR1B1), Monofunctional C1-tetrahydrofolate synthase (mitochondrial) (MTHFD1L), Protein disulfide-isomerase A6 (PDIA6), Pyruvate kinase isozymes M1/M2 (PKM), 6-phosphogluconolactonase (PGLS), Acetyl-CoA acetyltransferase (mitochondrial) (ACAT1), ERO1-like protein alpha (EROIL), Thioredoxin domain-containing protein 17 (TXNDC17), Protein disulfide-isomerase A4 (PDIA4), Protein disulfide-isomerase A3 (PDIA3), 3-ketoacyl-CoA thiolase (mitochondrial) (ACAA2), Dynamin-2 (DNM2), DNA replication licensing factor MCM3 (MCM3), Serine-tRNA ligase (cytoplasmic) (SARS), Fatty acid synthase (FASN), Acetyl-CoA acetyltransferase (mitochondrial) (ACAT1), Protein disulfide-isomerase (P4HB), Deoxycytidine kinase (DCK), Eukaryotic translation initiation factor 3 subunit (EIF3F), Protein disulfide-isomerase A6 (PDIA6), UDP-N-acetylglucosamine-peptide N-acetylglucosamine (OGT), Ketosamine-3-kinase (FN3KRP), Protein DJ-1 (PARK7), Phosphoglycolate phosphatase (PGP), DNA replication licensing factor MCM6 (MCM6), Fructose-2,6-bisphosphatase TIGAR (TIGAR), Cleavage and polyadenylation specificity factor subunit (CPSF3), Ubiquitin-conjugating enzyme E2 L3 (UBE2L3), Alanine-tRNA ligase, cytoplasmic (AARS), Mannose-1-phosphate guanyltransferase alpha (GMPPA), C-1-tetrahydrofolate synthase (cytoplasmic) (MTHFD1), Dynamin-1-like protein (DNM1L), Protein disulfide-isomerase A3 (PDIA3), Aspartyl aminopeptidase (DNPEP), Acetyl-CoA acetyltransferase (cytosolic) (ACAT2), Thioredoxin domain-containing protein 5 (TXNDC5), Thymidine kinase (cytosolic) (TK1), Inosine-5-monophosphate dehydrogenase 2 (IMPDH2), Ubiquitin carboxyl-terminal hydrolase isozyme L3 (UCHL3), Integrin-linked protein kinase (ILK), Cyclin-dependent kinase 2 (CDK2), Histone acetyltransferase type B catalytic subunit (HAT1), Enoyl-CoA delta isomerase 2 (mitochondrial) (ECI2), C-1-tetrahydrofolate synthase (cytoplasmic) (MTHFD1), Deoxycytidine kinase (DCK), Ubiquitin-like modifier-activating enzyme 6 (UBA6), Protein-L-isoaspartate (D-aspartate)O-methyltransferase (PCMT1), Monofunctional C1-tetrahydrofolate synthase (mitochondrial) (MTHFD1L), Thymidylate kinase (DTYMK), Protein ETHEl (mitochondrial) (ETHEl), Arginine-tRNA ligase (cytoplasmic) (RARS), NEDD8-activating enzyme E1 catalytic subunit (UBA3), Dual specificity mitogen-activated protein kinase (MAP2K3), Ubiquitin-conjugating enzyme E2S (UBE2S), Amidophosphoribosyltransferase (PPAT), Succinate-semialdehyde dehydrogenase (mitochondrial) (ALDH5A1), CAD, Phosphoenolpyruvate carboxykinase (PCK2), 6-phosphofructokinase type C (PFKP), Acyl-CoA synthetase family member 2 (mitochondrial) (ACSF2), Multifunctional protein ADE2 (PAICS), Desumoylating isopeptidase 1 (DESI1), 6-phosphofructokinase type C (PFKIF), V-type proton ATPase catalytic subunit A (ATP6VIA), 3-ketoacyl-CoA thiolase (peroxisomal) (ACAA1), Galactokinase (GALK1), Thymidine kinase (cytosolic) (TK1), ATPase WRNIP1 (WRNIP1), Phosphoribosylformylglycinamidine synthase (PFAS), V-type proton ATPase catalytic subunit A (ATP6V1A), Thioredoxin domain-containing protein 5 (TXNDC5), 4-trimethylaminobutyraldehyde dehydrogenase (ALDH9A1), Dual specificity mitogen-activated protein kinase (MAP2K4), Calcineurin-like phosphoesterase domain-containing (CPPED1), Dual specificity protein phosphatase 12 (DUSP12), Phosphoribosylformylglycinamidine synthase (PFAS), Diphosphomevalonate decarboxylase (MVD), D-3-phosphoglycerate dehydrogenase (PHGDH), Cell cycle checkpoint control protein RAD9A (RAD9A), Peroxiredoxin-1 (PRDX1), Sorbitol dehydrogenase (SORD), Peroxiredoxin-4 (PRDX4), AMP deaminase 2 (AMPD2), Isocitrate dehydrogenase (IDH1), Pyruvate carboxylase (mitochondrial) (PC), Integrin-linked kinase-associated serine/threonine (ILKAP), Methylmalonate-semialdehyde dehydrogenase (ALDH6A1), 26S proteasome non-ATPase regulatory subunit 14 (PSMD14), Thymidylate kinase (DTYMK), 6-phosphofructo-2-kinase/fructose-2,6-bisphosphata (PFKFB2), Peroxiredoxin-5 (mitochondrial) (PRDX5), PDP1, Cathepsin B (CTSB), Transmembrane protease serine 12 (TMPRSS12), UDP-glucose 6-dehydrogenase (UGDH), Histidine triad nucleotide-binding protein 1 (HINT1), E3 ubiquitin-protein ligase UBR5 (UBR5), SAM domain and HD domain-containing protein 1 (SAMHD1), Probable tRNA threonylcarbamoyladenosine biosynthesis (OSGEP), Methylated-DNA-protein-cysteine methyltransferase (MGMT), Fatty acid synthase (FASN), Adenosine deaminase (ADA), Cyclin-dependent kinase 19 (CDK19), Serine/threonine-protein kinase 38 (STK38), Mitogen-activated protein kinase 9 (MAPK9), tRNA (adenine(58)-N(1))-methyltransferase catalytic (TRMT61A), Glyoxylate reductase/hydroxypyruvate reductase (GRHPR), Aldehyde dehydrogenase (mitochondrial) (ALDH2), Mitochondrial-processing peptidase subunit beta (PMPCB), 3-ketoacyl-CoA thiolase, peroxisomal (ACAA1), Lysophosphatidic acid phosphatase type 6 (ACP6), Ubiquitin/ISG15-conjugating enzyme E2 L6 (UBE2L6), Caspase-8 (CASP8), 2,5-phosphodiesterase 12 (PDE12), Thioredoxin domain-containing protein 12 (TXNDC12), Nitrilase homolog 1 (NIT1), ERO1-like protein alpha (ERO1L), SUMO-activating enzyme subunit 1 (SAE1), Leucine-tRNA ligase (cytoplasmic) (LARS), Protein-glutamine gamma-glutamyltransferase 2 (TGM2), Probable DNA dC-dU-editing enzyme APOBEC-3C (APOBEC3C), Double-stranded RNA-specific adenosine deaminase (ADAR), Isocitrate dehydrogenase (IDH2), Methylcrotonoyl-CoA carboxylase beta chain (mitochondrial) (MCCC2), Uridine phosphorylase 1 (UPP1), Glycogen phosphorylase (brain form) (PYGB), E3 ubiquitin-protein ligase UBR5 (UBR5), Procollagen-lysine,2-oxoglutarate 5-dioxygenase 1 (PLOD1), Ubiquitin carboxyl-terminal hydrolase 48 (USP48), Aconitate hydratase (mitochondrial) (ACO2), GMP reductase 2 (GMPR2), Pyrroline-5-carboxylate reductase 1 (mitochondrial) (PYCR1), Cathepsin Z (CTSZ), E3 ubiquitin-protein ligase UBR2 (UBR2), Cysteine protease ATG4B (ATG4B), Serine/threonine-protein kinase Nek9 (NEK9), Lysine-specific demethylase 4B (KDM4B), Insulin-degrading enzyme (IDE), Dipeptidyl peptidase 9 (DPP9), Decaprenyl-diphosphate synthase subunit 2 (PDSS2), TFIIH basal transcription factor complex helicase (ERCC3), Methionine-R-sulfoxide reductase B2 (mitochondrial) (MSRB2), E3 ubiquitin-protein ligase BRE1B (RNF40), Thymidylate synthase (TYMS), Cyclin-dependent kinase 5 (CDK5), Bifunctional 3-phosphoadenosine 5-phosphosulfate (PAPSS2), Short/branched chain specific acyl-CoA dehydrogenase (ACADSB), Cathepsin D (CTSD), E3 ubiquitin-protein ligase HUWE1 (HUWE1), Calpain-2 catalytic subunit (CAPN2), Dual specificity mitogen-activated protein kinase (MAP2K7), Mitogen-activated protein kinase kinase kinase MLT (MLTK), Bleomycin hydrolase (BLMH), Probable ATP-dependent RNA helicase DDX59 (DDX59), Cystathionine gamma-lyase (CTH), S-adenosylmethionine synthase isoform type-2 (MAT2A), 6-phosphofructokinase type C (PFKP), Cytidine deaminase (CDA), DNA-directed RNA polymerase II subunit RPB2 (POLR2B), Protein disulfide-isomerase (P4HB), Procollagen-lysine,2-oxoglutarate 5-dioxygenase 3 (PLOD3), Nucleoside diphosphate-linked moiety X motif 8 (mitochondrial) (NUDT8), E3 ubiquitin-protein ligase HUWE1 (HUWE1), Methylated-DNA-protein-cysteine methyltransferase (MGMT), Nitrilase homolog 1 (NIT1), Interferon regulatory factor 2-binding protein 1 (IRF2BP1), Ubiquitin carboxyl-terminal hydrolase 16 (USP16), Glycylpeptide N-tetradecanoyltransferase 2 (NMT2), Cyclin-dependent kinase inhibitor 3 (CDKN3), Hydroxysteroid dehydrogenase-like protein 2 (HSDL2), Serine/threonine-protein kinase VRK1 (VRK1), Serine/threonine-protein kinase A-Raf (ARAF), ATP-citrate synthase (ACLY), Probable ribonuclease ZC3H12D (ZC3HI2D), Peripheral plasma membrane protein CASK (CASK), DNA polymerase epsilon subunit 3 (POLE3), Aldehyde dehydrogenase X (mitochondrial) (ALDHIB1), UDP-N-acetylglucosamine transferase subunit ALG3 (ALG3), Protein disulfide-isomerase A4 (PDIA4), DNA polymerase alpha catalytic subunit (POLA1), Ethylmalonyl-CoA decarboxylase (ECHDC 1), Protein-tyrosine kinase 2-beta (PTK2B), E3 SUMO-protein ligase RanBP2 (RANBP2), Legumain (LGMN), Non-specific lipid-transfer protein (SCP2), Long-chain-fatty-acid-CoA ligase 4 (ACSL4), Dual specificity protein phosphatase 12 (DUSP12), Oxidoreductase HTATIP2 (HTATIP2), Serine/threonine-protein kinase MRCK beta (CDC42BPB), Histone-lysine N-methyltransferase EZH2 (EZH2), Non-specific lipid-transfer protein (SCP2), Dual specificity mitogen-activated protein kinase (MAP2K7), Ubiquitin carboxyl-terminal hydrolase 28 (USP28), 6-phosphofructokinase (liver type) (PFKL), SWI/SNF-related matrix-associated actin-dependent (SMARCAD1), Protein phosphatase methylesterase 1 (PPME1), DNA replication licensing factor MCM5 (MCM5), 6-phosphofructo-2-kinase/fructose-2,6-bisphosphata (PFKFB4), Dehydrogenase/reductase SDR family member 11 (DHRS11), Pyroglutamyl-peptidase 1 (PGPEP1), Probable E3 ubiquitin-protein ligase (MYCBP2), DNA fragmentation factor subunit beta (DFFB), Deubiquitinating protein VCIP135 (VCPIP1), Putative transferase CAF17 (mitochondrial) (IBA57), Calpain-7 (CAPN7), GDP-L-fucose synthase (TSTA3), Protein disulfide-isomerase A4 (PDIA4, Probable ATP-dependent RNA helicase (DDX59), RNA exonuclease 4 (REXO4), PDK1, E3 SUMO-protein ligase (PIAS4), DNA (cytosine-5)-methyltransferase 1 (DNMT1), Alpha-aminoadipic semialdehyde dehydrogenase (ALDH7A1), Hydroxymethylglutaryl-CoA synthase (cytoplasmic) (HMGCS1), E3 ubiquitin-protein ligase (SMURF2), Aldehyde dehydrogenase X (mitochondrial) (ALDHIB1), Tyrosine-protein kinase (BTK), DNA repair protein RAD50 (RAD50), ATP-binding domain-containing protein 4 (ATPBD4), Nucleoside diphosphate kinase 3 (NME3), Interleukin-1 receptor-associated kinase 1 (IRAK1), Ribonuclease P/MRP protein subunit POP5 (POP5), Peptide-N(4)-(N-acetyl-beta-glucosaminyl)asparagin (NGLY1), Caspase-2 (CASP2), Ribosomal protein S6 kinase alpha-3 (RPS6KA3), E3 ubiquitin-protein ligase UBR1 (UBR1), Serine/threonine-protein kinase Chk2 (CHEK2), Phosphatidylinositol 3,4,5-trisphosphate 5-phospha (INPPL1), Histone acetyltransferase p300 (EP300), Creatine kinase U-type (mitochondrial) (CKMT1B), E3 ubiquitin-protein ligase TRIM33 (TRIM33), Cancer-related nucleoside-triphosphatase (NTPCR), Aconitate hydratase (mitochondrial) (ACO2), Ubiquitin carboxyl-terminal hydrolase 34 (USP34), Probable E3 ubiquitin-protein ligase HERC4 (HERC4), E3 ubiquitin-protein ligase HECTD1 (HECTD1), Peroxisomal 2,4-dienoyl-CoA reductase (DECR2), Helicase ARIP4 (RAD54L2), Ubiquitin-like modifier-activating enzyme 7 (UBA7), ER degradation-enhancing alpha-mannosidase-like 3 (EDEM3), Ubiquitin-conjugating enzyme E20 (UBE20), Dual specificity mitogen-activated protein kinase (MAP2K7), Myotubularin-related protein 1 (MTMR1), Calcium-dependent phospholipase A2 (PLA2G5), Mitotic checkpoint serine/threonine-protein kinase (BUB1B), Putative transferase CAF17 (mitochondrial) (IBA57), Tyrosine-protein kinase ZAP-70 (ZAP70), E3 ubiquitin-protein ligase pellino homolog 1 (PELI1), Neuropathy target esterase (PNPLA6), Ribosomal protein S6 kinase alpha-3 (RPS6KA3), N6-adenosine-methyltransferase 70 kDa subunit (METTL3), Fructosamine-3-kinase (FN3K), Ubiquitin carboxyl-terminal hydrolase 22 (USP22), Rab3 GTPase-activating protein catalytic subunit (RAB3GAP1), Caspase-5 (CASP5), L-2-hydroxyglutarate dehydrogenase (mitochondrial) (L2HGDH), Saccharopine dehydrogenase-like oxidoreductase (SCCPDH), FLAD1 FAD synthase, Lysine-specific demethylase 3A (KDM3A), or Ubiquitin carboxyl-terminal hydrolase 34 (USP34).

[0072] In some embodiments, the cysteine-containing protein is a signaling protein. In some instances, exemplary signaling protein includes vascular endothelial growth factor (VEGF) proteins or proteins involved in redox signaling. Exemplary VEGF proteins include VEGF-A, VEGF-B, VEGF-C, VEGF-D, and PGF. Exemplary proteins involved in redox signaling include redox-regulatory protein FAM213A.

[0073] In some embodiments, the cysteine-containing protein is a transcription factor or regulator. Exemplary cysteine-containing proteins as transcription factors and regulators include, but are not limited to, 40S ribosomal protein S3 (RPS3), Basic leucine zipper and W2 domain-containing protein (BZW1), Poly(rC)-binding protein 1 (PCBP1), 40S ribosomal protein S11 (RPS11), 40S ribosomal protein S4, X isoform (RPS4X), Signal recognition particle 9 kDa protein (SRP9), Non-POU domain-containing octamer-binding protein (NONO), N-alpha-acetyltransferase 15, NatA auxiliary subunit (NAA15), Cleavage stimulation factor subunit 2 (CSTF2), Lamina-associated polypeptide 2, isoform alpha (TMPO), Heterogeneous nuclear ribonucleoprotein R (HNRNPR), MMS19 nucleotide excision repair protein homolog (MMS19), SWI/SNF complex subunit SMARCC2 (SMARCC2), Enhancer of mRNA-decapping protein 3 (EDC3), H/ACA ribonucleoprotein complex subunit 2 (NHP2), WW domain-containing adapter protein with coiled-c (WAC), N-alpha-acetyltransferase 15 NatA auxiliary subunit (NAA15), 40S ribosomal protein S11 (RPS11), Signal transducer and activator of transcription 1 (STAT1), Mediator of RNA polymerase II transcription subunit (MED15), Lamina-associated polypeptide 2 (isoform alpha) (TMPO), MMS19 nucleotide excision repair protein homolog (MMS19), DNA mismatch repair protein Msh2 (MSH2), Recombining binding protein suppressor of hairless (RBPJ), Mediator of RNA polymerase II transcription subunit (MED17), Heterogeneous nuclear ribonucleoprotein U (HNRNPU), Transcription initiation factor IIA subunit 2 (GTF2A2), Chromatin accessibility complex protein 1 (CHRAC1), CDKN2A-interacting protein (CDKN2AIP), Zinc finger protein 217 (ZNF217), Signal transducer and activator of transcription 3 (STAT3), WD repeat and HMG-box DNA-binding protein 1 (WDHD1), Lamina-associated polypeptide 2 (isoform alpha) (TMPO), Lamina-associated polypeptide 2 (isoforms beta/gam) (TMPO), Interferon regulatory factor 4 (IRF4), Protein flightless-1 homolog (FLI1), Heterogeneous nuclear ribonucleoprotein F (HNRNPF), Nucleus accumbens-associated protein 1 (NACC1), Transcription elongation regulator 1 (TCERG1), Protein HEXIM1 (HEXIM1), Enhancer of mRNA-decapping protein (EDC3), Zinc finger protein Aiolos (IKZF3), Transcription elongation factor SPT5 (SUPT5H), Forkhead box protein K1 (FOXK1), LIM domain-containing protein 1 (LIMD1), MMS19 nucleotide excision repair protein homolog (MMS19), Elongator complex protein 4 (ELP4), Ankyrin repeat and KH domain-containing protein 1 (ANKHD1), PML, Nuclear factor NF-kappa-B p100 subunit (NFKB2), Heterogeneous nuclear ribonucleoprotein L-like (HNRPLL), CCR4-NOT transcription complex subunit 3 (CNOT3), Constitutive coactivator of PPAR-gamma-like protein (FAMI20A), Mediator of RNA polymerase II transcription subunit (MED15), 60S ribosomal protein L7 (RPL7), Interferon regulatory factor 8 (IRF8), COUP transcription factor 2 (NR2F2), Mediator of RNA polymerase II transcription subunit (MED1), tRNA (uracil-5-)-methyltransferase homolog A (TRMT2A), Transcription factor p65 (RELA), Exosome complex component RRP42 (EXOSC7), General transcription factor 3C polypeptide 1 (GTF3C1), Mothers against decapentaplegic homolog 2 (SMAD2), Ankyrin repeat domain-containing protein 17 (ANKRD17), MMS19 nucleotide excision repair protein homolog (MMS19), Death domain-associated protein 6 (DAXX), Zinc finger protein 318 (ZNF318), Thioredoxin-interacting protein (TXNIP), Glucocorticoid receptor (NR3C1), Iron-responsive element-binding protein 2 (IREB2), Zinc finger protein 295 (ZNF295), Polycomb protein SUZ12 (SUZ12), Cleavage stimulation factor subunit 2 tau variant (CSTF2T), C-myc promoter-binding protein (DENND4A), Pinin (PNN), Mediator of RNA polymerase II transcription subunit (MED9), POU domain, class 2, transcription factor 2 (POU2F2), Enhancer of mRNA-decapping protein 3 (EDC3), A-kinase anchor protein 1 (mitochondrial) (AKAP1), Transcription factor RelB (RELB), RNA polymerase II-associated protein 1 (RPAP1), Zinc finger protein 346 (ZNF346), Chromosome-associated kinesin KIF4A (KIF4A), Mediator of RNA polymerase II transcription subunit (MED12), Protein NPAT (NPAT), Leucine-rich PPR motif-containing protein (mitochondrial) (LRPPRC), AT-hook DNA-binding motif-containing protein 1 (AHDC1), Mediator of RNA polymerase II transcription subunit (MED12), Bromodomain-containing protein 8 (BRD8), Trinucleotide repeat-containing gene 6B protein (TNRC6B), Aryl hydrocarbon receptor nuclear translocator (ARNT), Activating transcription factor 7-interacting protein (ATF7IP), Glucocorticoid receptor (NR3C1), Chromosome transmission fidelity protein 18 homolog (CHTF18), or C-myc promoter-binding protein (DENND4A).

[0074] In some embodiments, the cysteine-containing protein is a channel, transporter, or receptor. Exemplary cysteine-containing proteins as channels, transporters, or receptors include, but are not limited to, Chloride intracellular channel protein 4 (CLIC4), Exportin-1 (XPO1), Thioredoxin (TXN), Protein SEC13 homolog (SEC13), Chloride intracellular channel protein 1 (CLIC1), Guanine nucleotide-binding protein subunit beta-2 (GNB2L1), Sorting nexin-6 (SNX6), Conserved oligomeric Golgi complex subunit 3 (COG3), Nuclear cap-binding protein subunit 1 (NCBP1), Cytoplasmic dynein 1 light intermediate chain 1 (DYNC1LI1), MOB-like protein phocein (MOB4), Programmed cell death 6-interacting protein (PDCD6IP), Glutaredoxin-1 (GLRX), ATP synthase subunit alpha (mitochondrial) (ATP5A1), Treacle protein (TCOF1), Dynactin subunit 1 (DCTN1), Importin-7 (IPO7), Exportin-2 (CSE1L), ATP synthase subunit gamma (mitochondrial) (ATP5C1), Trafficking protein particle complex subunit 5 (TRAPPC5), Thioredoxin mitochondrial (TXN2), THO complex subunit 6 homolog (THOC6), Exportin-1 (XPO1), Nuclear pore complex protein Nup50 (NUP50), Treacle protein (TCOF1), Nuclear pore complex protein Nup93 (NUP93), Nuclear pore glycoprotein p62 (NUP62), Cytoplasmic dynein 1 heavy chain 1 (DYNC1H1), Thioredoxin-like protein 1 (TXNL1), Nuclear pore complex protein Nup214 (NUP214), Protein lin-7 homolog C (LIN7C), ADP-ribosylation factor-binding protein GGA2 (GGA2), Trafficking protein particle complex subunit 4 (TRAPPC4), Protein quaking (QK1), Perilipin-3 (PLIN3), Copper transport protein ATOX1 (ATOX1), Unconventional myosin-Ic (MYO1C), Nucleoporin NUP53 (NUP35), Vacuolar protein sorting-associated protein 18 homolog (VPS18), Dedicator of cytokinesis protein 7 (DOCK7), Nucleoporin p54 (NUP54), Ras-related GTP-binding protein C (RRAGC), Arf-GAP with Rho-GAP domain (ANK repeat and PH domain) (ARAP1), Exportin-5 (XPO5), Kinectin (KTN1), Chloride intracellular channel protein 6 (CLIC6), Voltage-gated potassium channel subunit beta-2 (KCNAB2), Exportin-5 (XPO5), Ras-related GTP-binding protein C (RRAGC), Ribosome-binding protein 1 (RRBP1), Acyl-CoA-binding domain-containing protein 6 (ACBD6), Chloride intracellular channel protein 5 (CLIC5), Pleckstrin homology domain-containing family A member (PLEKHA2), ADP-ribosylation factor-like protein 3 (ARL3), Protein transport protein Sec24C (SEC24C), Voltage-dependent anion-selective channel protein (VDAC3), Programmed cell death 6-interacting protein (PDCD6IP), Chloride intracellular channel protein 3 (CLIC3), Multivesicular body subunit 12A (FAM125A), Eukaryotic translation initiation factor 4E transporter (EIF4ENIF1), NmrA-like family domain-containing protein 1 (NMRAL1), Nuclear pore complex protein Nup98-Nup96 (NUP98), Conserved oligomeric Golgi complex subunit 1 (COG1), Importin-4 (IPO4), Pleckstrin homology domain-containing family A member (PLEKHA2), Cytoplasmic dynein 1 heavy chain 1 (DYNC1H1), DENN domain-containing protein 1C (DENND1C), Cytoplasmic dynein 1 heavy chain 1 (DYNC1H1), Protein ELYS (AHCTF1), Trafficking protein particle complex subunit 1 (TRAPPC1), Guanine nucleotide-binding protein-like 3 (GNL3), or Importin-13 (IPO13).

[0075] In some embodiments, the cysteine-containing protein is a chaperone. Exemplary cysteine-containing proteins as chaperones include, but are not limited to, 60 kDa heat shock protein (mitochondrial) (HSPD1), T-complex protein 1 subunit eta (CCT7), T-complex protein 1 subunit epsilon (CCT5), Heat shock 70 kDa protein 4 (HSPA4), GrpE protein homolog 1 (mitochondrial) (GRPEL1), Tubulin-specific chaperone E (TBCE), Protein unc-45 homolog A (UNC45A), Serpin H1 (SERPINH1), Tubulin-specific chaperone D (TBCD), Peroxisomal biogenesis factor 19 (PEXI9), BAG family molecular chaperone regulator 5 (BAGS), T-complex protein 1 subunit theta (CCT8), Protein canopy homolog 3 (CNPY3), DnaJ homolog subfamily C member 10 (DNAJC10), ATP-dependent Clp protease ATP-binding subunit clp (CLPX), or Midasin (MDN1).

[0076] In some embodiments, the cysteine-containing protein is an adapter, scaffolding, or modulator protein. Exemplary cysteine-containing proteins as adapter, scaffolding, or modulator proteins include, but are not limited to, Proteasome activator complex subunit 1 (PSME1), TIP41-like protein (TIPRL), Crk-like protein (CRKL), Cofilin-1 (CFL1), Condensin complex subunit 1 (NCAPD2), Translational activator GCN1 (GCNIL1), Serine/threonine-protein phosphatase 2A 56 kDa regulatory (PPP2R5D), UPF0539 protein C7orf59 (C7orf59), Protein diaphanous homolog 1 (DIAPH1), Protein asunder homolog (Asun), Ras GTPase-activating-like protein IQGAP1 (IQGAP1), Sister chromatid cohesion protein PDS5 homolog A (PDS5A), Reticulon-4 (RTN4), Proteasome activator complex subunit 4 (PSME4), Condensin complex subunit 2 (NCAPH), Sister chromatid cohesion protein PDS5 homolog A (PDS5A), cAMP-dependent protein kinase type I-alpha regulatory (PRKAR1A), Host cell factor 1 (HCFC1), Serine/threonine-protein phosphatase 4 regulatory (PPP4R2), Apoptotic chromatin condensation inducer in the nucleus (ACIN1), BRISC and BRCA1-A complex member 1 (BABAM1), Interferon-induced protein with tetratricopeptide (IFIT3), Ras association domain-containing protein 2 (RASSF2), Hsp70-binding protein 1 (HSPBP1), TBC1 domain family member 15 (TBC1D15), Dynamin-binding protein (DNMBP), Condensin complex subunit 1 (NCAPD2), Beta-2-syntrophin (SNTB2), Disks large homolog 1 (DLG1), TBC1 domain family member 13 (TBC1D13), Formin-binding protein 1-like (FNBP1L), Translational activator GCN1 (GCN1L1), GRB2-related adapter protein (GRAP), G2/mitotic-specific cyclin-B1 (CCNB 1), Myotubularin-related protein 12 (MTMR12), Protein FADD (FADD), Translational activator GCN1 (GCN1L1), Wings apart-like protein homolog (WAPAL), cAMP-dependent protein kinase type U-beta regulatory (PRKAR2B), Malcavernin (CCM2), MPP1 55 kDa erythrocyte membrane protein, Actin filament-associated protein 1 (AFAP1), Tensin-3 (TNS3), tRNA methyltransferase 112 homolog (TRMT112), Symplekin (SYMPK), TBC1 domain family member 2A (TBC1D2), ATR-interacting protein (ATRIP), Ataxin-10 (ATXN10), Succinate dehydrogenase assembly factor 2 (mitochondrial) (SDHAF2), Formin-binding protein 1 (FNBP1), Myotubularin-related protein 12 (MTMR12), Interferon-induced protein with tetratricopeptide (IFIT3), Protein CBFA2T2 (CBFA2T2), Neutrophil cytosol factor 1 (NCF1), or Protein syndesmos (NUDT16L1).

[0077] In some embodiments, a cysteine-containing polypeptide comprises a protein illustrated in Tables 1-5. In some instances, a cysteine-containing polypeptide comprises a protein illustrated in Table 1. In some instances, a cysteine-containing polypeptide comprises a protein illustrated in Table 2. In some instances, a cysteine-containing polypeptide comprises a protein illustrated in Table 3. In some instances, a cysteine-containing polypeptide comprises a protein illustrated in Table 4. In some instances, a cysteine-containing polypeptide comprises a protein illustrated in Table 5.

[0078] In some embodiments, a cysteine-containing polypeptide comprises a protein illustrated in Tables 6A-6E. In some instances, a cysteine-containing polypeptide comprises a protein illustrated in Table 6A. In some instances, a cysteine-containing polypeptide comprises a protein illustrated in Table 6B. In some instances, a cysteine-containing polypeptide comprises a protein illustrated in Table 6C. In some instances, a cysteine-containing polypeptide comprises a protein illustrated in Table 6D. In some instances, a cysteine-containing polypeptide comprises a protein illustrated in Table 6E.

[0079] In some embodiments, a cysteine-containing polypeptide comprises cereblon. Cereblon is a substrate receptor that interacts with the protein adaptor damaged DNA binding protein 1 (DDB1), scaffold Cullin-4A (CUL4A), and regulator of cullins 1 (ROC1) to form an E3 ubiquitin ligase complex. The cereblon-E3 ligase complex is involved in targeting a plurality of substrates for ubiquitination, which are then subsequently degraded by proteasomes. In some instances, thalidomide and related immunomodulatory (IMiD) compounds such as lenalidomide and pomalidomide promote and modulate cereblon recruitment of neosubstrates. For example, a cereblon modulator CC-220 has been shown to improve degradation of Ikaros and Aiolos, two zinc finger transcription factors that have been implicated in lymphoid development and differentiation (Matyskiela, et al., “A cereblon modulator (CC-220) with improved degradation of Ikaros and Aiolos,” J Med Chem. Apr. 20, 2017). Further, dBET1, a bifunctional phthalimide-conjugated ligand which is a substrate for cereblon, also selectively targets BRD4, a transcriptional coactivator, for degradation.

[0080] In some instances, cereblon is a eukaryotic protein ranging from 400-600 residues in length. The human cereblon (SEQ ID NO: 9665), which is about 442 residues in length, is encoded by the CRBN gene. The cereblon protein comprises a central LON domain (residues 80-317) followed by a C-terminal CULT domain. The LON domain is further subdivided into an N-terminal LON-N subdomain, a four helix bundle, and a C-terminal LON-C subdomain.

[0081] In some embodiments, a small molecule fragment described herein binds to a cysteine residue within cereblon. In some cases, a small molecule fragment described herein binds to a cysteine residue in the LON domain of cereblon. In some cases, a small molecule fragment described herein binds to a cysteine residue in the LON-N domain of cereblon. In some cases, a small molecule fragment described herein binds to a cysteine residue in the LON-C domain of cereblon. In other cases, a small molecule fragment described herein binds to a cysteine residue in the CULT domain of cereblon. In some instances, a small molecule fragment described herein binds to cysteine residue 188 of cereblon, wherein residue position 188 corresponds to position 188 of SEQ ID NO: 9665. In some instances, a small molecule fragment described herein binds to cysteine residue 287 of cereblon, wherein residue position 287 corresponds to position 287 of SEQ ID NO: 9665.

[0082] In some embodiments, described herein is a method of modulating cereblon activity, which comprises contacting a cell expressing cereblon with a small molecule fragment of Formula (I):

[chemical structure]

wherein RM is a reactive moiety selected from a Michael acceptor moiety, a leaving group moiety, or a moiety capable of forming a covalent bond with the thiol group of cysteine residue; and F is a small molecule fragment moiety; wherein the small molecule fragment of Formula (I) covalently binds to residue 187 or residue 288 of cereblon; and wherein residue positions 187 and 288 correspond to positions 187 and 288 of SEQ ID NO: 9665. In some instances, F is a small molecule fragment moiety illustrated in FIG. 1 (e.g., FIG. 1A and/or FIG. 1B). In some instances, F optionally comprises a second reactive moiety. In some cases, the cell is a mammalian cell. In some cases, the method is an in vivo method.

### Polypeptides Comprising a Cysteine Interacting Site

[0083] In some embodiments, a cysteine-containing polypeptide comprises a polypeptide that is at most 50 amino acid residues in length. In some embodiments, a cysteine-containing polypeptide comprises an isolated and purified polypeptide comprising at least 70% sequence identity to at least seven contiguous amino acids of an amino acid sequence selected from SEQ ID NOs: 1-9655. In some embodiments, a cysteine-containing polypeptide comprises an isolated and purified polypeptide comprising at least 75% sequence identity to at least seven contiguous amino acids of an amino acid sequence selected from SEQ ID NOs: 1-9655. In some embodiments, a cysteine-containing polypeptide comprises an isolated and purified polypeptide comprising at least 80% sequence identity to at least seven contiguous amino acids of an amino acid sequence selected from SEQ ID NOs: 1-9655. In some embodiments, a cysteine-containing polypeptide comprises an isolated and purified polypeptide comprising at least 85% sequence identity to at least seven contiguous amino acids of an amino acid sequence selected from SEQ ID NOs: 1-9655. In some embodiments, a cysteine-containing polypeptide comprises an isolated and purified polypeptide comprising at least 90% sequence identity to at least seven contiguous amino acids of an amino acid sequence selected from SEQ ID NOs: 1-9655. In some embodiments, a cysteine-containing polypeptide comprises an isolated and purified polypeptide comprising at least 91% sequence identity to at least seven contiguous amino acids of an amino acid sequence selected from SEQ ID NOs: 1-9655. In some embodiments, a cysteine-containing polypeptide comprises an isolated and purified polypeptide comprising at least 92% sequence identity to at least seven contiguous amino acids of an amino acid sequence selected from SEQ ID NOs: 1-9655. In some embodiments, a cysteine-containing polypeptide comprises an isolated and purified polypeptide comprising at least 93% sequence identity to at least seven contiguous amino acids of an amino acid sequence selected from SEQ ID NOs: 1-9655. In some embodiments, a cysteine-containing polypeptide comprises an isolated and purified polypeptide comprising at least 94% sequence identity to at least seven contiguous amino acids of an amino acid sequence selected from SEQ ID NOs: 1-9655. In some embodiments, a cysteine-containing polypeptide comprises an isolated and purified polypeptide comprising at least 95% sequence identity to at least seven contiguous amino acids of an amino acid sequence selected from SEQ ID NOs: 1-9655. In some embodiments, a cysteine-containing polypeptide comprises an isolated and purified polypeptide comprising at least 96% sequence identity to at least seven contiguous amino acids of an amino acid sequence selected from SEQ ID NOs: 1-9655. In some embodiments, a cysteine-containing polypeptide comprises an isolated and purified polypeptide comprising at least 97% sequence identity to at least seven contiguous amino acids of an amino acid sequence selected from SEQ ID NOs: 1-9655. In some embodiments, a cysteine-containing polypeptide comprises an isolated and purified polypeptide comprising at least 98% sequence identity to at least seven contiguous amino acids of an amino acid sequence selected from SEQ ID NOs: 1-9655. In some embodiments, a cysteine-containing polypeptide comprises an isolated and purified polypeptide comprising at least 99% sequence identity to at least seven contiguous amino acids of an amino acid sequence selected from SEQ ID NOs: 1-9655. In some embodiments, a cysteine-containing polypeptide comprises an isolated and purified polypeptide comprising 100% sequence identity to at least seven contiguous amino acids of an amino acid sequence selected from SEQ ID NOs: 1-9655. In some embodiments, a cysteine-containing polypeptide comprises an isolated and purified polypeptide consisting of 100% sequence identity to at least seven contiguous amino acids of an amino acid sequence selected from SEQ ID NOs: 1-9655.

[0084] In some embodiments, a cysteine-containing polypeptide comprises an isolated and purified polypeptide comprising at least 70%, 75%, 80%, 85%, 90%, 91%, 92%, 93%, 94%, 95%, 96%, 97%, 98%, or 99% sequence identity to at least seven contiguous amino acids of SEQ ID NO: 1607. In some embodiments, a cysteine-containing polypeptide comprises an isolated and purified polypeptide comprising at least 70% sequence identity to at least seven contiguous amino acids of SEQ ID NO: 1607. In some embodiments, a cysteine-containing polypeptide comprises an isolated and purified polypeptide comprising at least 75% sequence identity to at least seven contiguous amino acids of SEQ ID NO: 1607. In some embodiments, a cysteine-containing polypeptide comprises an isolated and purified polypeptide comprising at least 80% sequence identity to at least seven contiguous amino acids of SEQ ID NO: 1607. In some embodiments, a cysteine-containing polypeptide comprises an isolated and purified polypeptide comprising at least 85% sequence identity to at least seven contiguous amino acids of SEQ ID NO: 1607. In some embodiments, a cysteine-containing polypeptide comprises an isolated and purified polypeptide comprising at least 90% sequence identity to at least seven contiguous amino acids of SEQ ID NO: 1607. In some embodiments, a cysteine-containing polypeptide comprises an isolated and purified polypeptide comprising at least 91% sequence identity to at least seven contiguous amino acids of SEQ ID NO: 1607. In some embodiments, a cysteine-containing polypeptide comprises an isolated and purified polypeptide comprising at least 92% sequence identity to at least seven contiguous amino acids of SEQ ID NO: 1607. In some embodiments, a cysteine-containing polypeptide comprises an isolated and purified polypeptide comprising at least 93% sequence identity to at least seven contiguous amino acids of SEQ ID NO: 1607. In some embodiments, a cysteine-containing polypeptide comprises an isolated and purified polypeptide comprising at least 94% sequence identity to at least seven contiguous amino acids of SEQ ID NO: 1607. In some embodiments, a cysteine-containing polypeptide comprises an isolated and purified polypeptide comprising at least 95% sequence identity to at least seven contiguous amino acids of SEQ ID NO: 1607. In some embodiments, a cysteine-containing polypeptide comprises an isolated and purified polypeptide comprising at least 96% sequence identity to at least seven contiguous amino acids of SEQ ID NO: 1607. In some embodiments, a cysteine-containing polypeptide comprises an isolated and purified polypeptide comprising at least 97% sequence identity to at least seven contiguous amino acids of SEQ ID NO: 1607. In some embodiments, a cysteine-containing polypeptide comprises an isolated and purified polypeptide comprising at least 98% sequence identity to at least seven contiguous amino acids of SEQ ID NO: 1607. In some embodiments, a cysteine-containing polypeptide comprises an isolated and purified polypeptide comprising at least 99% sequence identity to at least seven contiguous amino acids of SEQ ID NO: 1607. In some embodiments, a cysteine-containing polypeptide comprises an isolated and purified polypeptide comprising 100% sequence identity to at least seven contiguous amino acids of SEQ ID NO: 1607.

[0085] In some embodiments, a cysteine-containing polypeptide comprises an isolated and purified polypeptide comprising at least 70%, 75%, 80%, 85%, 90%, 91%, 92%, 93%, 94%, 95%, 96%, 97%, 98%, or 99% sequence identity to SEQ ID NO: 1607. In some embodiments, a cysteine-containing polypeptide comprises an isolated and purified polypeptide comprising 100% sequence identity to SEQ ID NO: 1607. In some embodiments, a cysteine-containing polypeptide comprises an isolated and purified polypeptide consisting of 100% sequence identity to SEQ ID NO: 1607.

[0086] In some embodiments, a cysteine-containing polypeptide comprises an isolated and purified polypeptide comprising at least 70%, 75%, 80%, 85%, 90%, 91%, 92%, 93%, 94%, 95%, 96%, 97%, 98%, or 99% sequence identity to at: least seven contiguous amino acids of SEQ ID NO: 6311. In some embodiments, a cysteine-containing polypeptide comprises an isolated and purified polypeptide comprising at least 70% sequence identity to at least seven contiguous amino acids of SEQ ID NO: 6311. In some embodiments, a cysteine-containing polypeptide comprises an isolated and purified polypeptide comprising at least 75% sequence identity to at least seven contiguous amino acids of SEQ ID NO: 6311. In some embodiments, a cysteine-containing polypeptide comprises an isolated and purified polypeptide comprising at least 80% sequence identity to at least seven contiguous amino acids of SEQ ID NO: 6311. In some embodiments, a cysteine-containing polypeptide comprises an isolated and purified polypeptide comprising at least 85% sequence identity to at least seven contiguous amino acids of SEQ ID NO: 6311. In some embodiments, a cysteine-containing polypeptide comprises an isolated and purified polypeptide comprising at least 90% sequence identity to at least seven contiguous amino acids of SEQ ID NO: 6311. In some embodiments, a cysteine-containing polypeptide comprises an isolated and purified polypeptide comprising at least 91% sequence identity to at least seven contiguous amino acids of SEQ ID NO: 6311. In some embodiments, a cysteine-containing polypeptide comprises an isolated and purified polypeptide comprising at least 92% sequence identity to at least seven contiguous amino acids of SEQ ID NO: 6311. In some embodiments, a cysteine-containing polypeptide comprises an isolated and purified polypeptide comprising at least 93% sequence identity to at least seven contiguous amino acids of SEQ ID NO: 6311. In some embodiments, a cysteine-containing polypeptide comprises an isolated and purified polypeptide comprising at least 94% sequence identity to at least seven contiguous amino acids of SEQ ID NO: 6311. In some embodiments, a cysteine-containing polypeptide comprises an isolated and purified polypeptide comprising at least 95% sequence identity to at least seven contiguous amino acids of SEQ ID NO: 6311. In some embodiments, a cysteine-containing polypeptide comprises an isolated and purified polypeptide comprising at least 96% sequence identity to at least seven contiguous amino acids of SEQ ID NO: 6311. In some embodiments, a cysteine-containing polypeptide comprises an isolated and purified polypeptide comprising at least 97% sequence identity to at least seven contiguous amino acids of SEQ ID NO: 6311. In some embodiments, a cysteine-containing polypeptide comprises an isolated and purified polypeptide comprising at least 98% sequence identity to at least seven contiguous amino acids of SEQ ID NO: 6311. In some embodiments, a cysteine-containing polypeptide comprises an isolated and purified polypeptide comprising at least 99% sequence identity to at least seven contiguous amino acids of SEQ ID NO: 6311. In some embodiments, a cysteine-containing polypeptide comprises an isolated and purified polypeptide comprising 100% sequence identity to at least seven contiguous amino acids of SEQ ID NO: 6311.

[0087] In some embodiments, a cysteine-containing polypeptide comprises an isolated and purified polypeptide comprising at least 70%, 75%, 80%, 85%, 90%, 91%, 92%, 93%, 94%, 95%, 96%, 97%, 98%, or 99% sequence identity to SEQ ID NO: 6311. In some embodiments, a cysteine-containing polypeptide comprises an isolated and purified polypeptide comprising 100% sequence identity to SEQ ID NO: 6311. In some embodiments, a cysteine-containing polypeptide comprises an isolated and purified polypeptide consisting of 100% sequence identity to SEQ ID NO: 6311.

[0088] As used herein, a polypeptide includes natural amino acids, unnatural amino acids, or a combination thereof. In some instances, an amino acid residue refers to a molecule containing both an amino group and a carboxyl group. Suitable amino acids include, without limitation, both the D- and L-isomers of the naturally-occurring amino acids, as well as non-naturally occurring amino acids prepared by organic synthesis or other metabolic routes. The term amino acid, as used herein, includes, without limitation, α-amino acids, natural amino acids, non-natural amino acids, and amino acid analogs.

[0089] The term “α-amino acid” refers to a molecule containing both an amino group and a carboxyl group bound to a carbon which is designated the α-carbon.

[0090] The term “β-amino acid” refers to a molecule containing both an amino group and a carboxyl group in a β configuration.

[0091] “Naturally occurring amino acid” refers to any one of the twenty amino acids commonly found in peptides synthesized in nature, and known by the one letter abbreviations A, R, N, C, D, Q, E, G, H, I, L, K, M, F, P, S, T, W, Y, and V.

[0092] “Hydrophobic amino acids” include small hydrophobic amino acids and large hydrophobic amino acids. “Small hydrophobic amino acid” are glycine, alanine, proline, and analogs thereof. “Large hydrophobic amino acids” are valine, leucine, isoleucine, phenylalanine, methionine, tryptophan, and analogs thereof. “Polar amino acids” are serine, threonine, asparagine, glutamine, cysteine, tyrosine, and analogs thereof. “Charged amino acids” are lysine, arginine, histidine, aspartate, glutamate, and analogs thereof.

[0093] The term “amino acid analog” refers to a molecule which is structurally similar to an amino acid and which is substituted for an amino acid in the formation of a peptidomimetic macrocycle. Amino acid analogs include, without limitation, p-amino acids and amino acids where the amino or carboxy group is substituted by a similarly reactive group (e.g., substitution of the primary amine with a secondary or tertiary amine, or substitution of the carboxy group with an ester).

[0094] The term “non-natural amino acid” refers to an amino acid which is not one of the twenty amino acids commonly found in peptides synthesized in nature, and known by the one letter abbreviations A, R, N, C, D, Q, E, G, H, I, L, K, M, F, P, S, T, W, Y, and V.

[0095] In some instances, amino acid analogs include 1-amino acid analogs. Examples of β-amino acid analogs include, but are not limited to, the following: cyclic p-amino acid analogs; 3-alanine; (R)-β-phenylalanine; (R)-1,2,3,4-tetrahydro-isoquinoline-3-acetic acid; (R)-3-amino-4-(1-naphthyl)-butyric acid; (R)-3-amino-4-(2,4-dichlorophenyl)butyric acid; (R)-3-amino-4-(2-chlorophenyl)-butyric acid; (R)-3-amino-4-(2-cyanophenyl)-butyric acid; (R)-3-amino-4-(2-fluorophenyl)-butyric acid; (R)-3-amino-4-(2-furyl)-butyric acid; (R)-3-amino-4-(2-methylphenyl)-butyric acid; (R)-3-amino-4-(2-naphthyl)-butyric acid; (R)-3-amino-4-(2-thienyl)-butyric acid; (R)-3-amino-4-(2-trifluoromethylphenyl)-butyric acid; (R)-3-amino-4-(3,4-dichlorophenyl)butyric acid; (R)-3-amino-4-(3,4-difluorophenyl)butyric acid; (R)-3-amino-4-(3-benzothienyl)-butyric acid; (R)-3-amino-4-(3-chlorophenyl)-butyric acid; (R)-3-amino-4-(3-cyanophenyl)-butyric acid; (R)-3-amino-4-(3-fluorophenyl)-butyric acid; (R)-3-amino-4-(3-methylphenyl)-butyric acid; (R)-3-amino-4-(3-pyridyl)-butyric acid; (R)-3-amino-4-(3-thienyl)-butyric acid; (R)-3-amino-4-(3-trifluoromethylphenyl)-butyric acid; (R)-3-amino-4-(4-bromophenyl)-butyric acid; (R)-3-amino-4-(4-chlorophenyl)-butyric acid; (R)-3-amino-4-(4-cyanophenyl)-butyric acid; (R)-3-amino-4-(4-fluorophenyl)-butyric acid; (R)-3-amino-4-(4-iodophenyl)-butyric acid; (R)-3-amino-4-(4-methylphenyl)-butyric acid; (R)-3-amino-4-(4-nitrophenyl)-butyric acid; (R)-3-amino-4-(4-pyridyl)-butyric acid; (R)-3-amino-4-(4-trifluoromethylphenyl)-butyric acid; (R)-3-amino-4-pentafluoro-phenylbutyric acid; (R)-3-amino-5-hexenoic acid; (R)-3-amino-5-hexynoic acid; (R)-3-amino-5-phenylpentanoic acid; (R)-3-amino-6-phenyl-5-hexenoic acid; (S)-1,2,3,4-tetrahydro-isoquinoline-3-acetic acid; (S)-3-amino-4-(1-naphthyl)-butyric acid; (S)-3-amino-4-(2,4-dichlorophenyl)butyric acid; (S)-3-amino-4-(2-chlorophenyl)-butyric acid; (S)-3-amino-4-(2-cyanophenyl)-butyric acid; (S)-3-amino-4-(2-fluorophenyl)-butyric acid; (S)-3-amino-4-(2-furyl)-butyric acid; (S)-3-amino-4-(2-methylphenyl)-butyric acid; (S)-3-amino-4-(2-naphthyl)-butyric acid; (S)-3-amino-4-(2-thienyl)-butyric acid; (S)-3-amino-4-(2-trifluoromethylphenyl)-butyric acid; (S)-3-amino-4-(3,4-dichlorophenyl)butyric acid; (S)-3-amino-4-(3,4-difluorophenyl)butyric acid; (S)-3-amino-4-(3-benzothienyl)-butyric acid; (S)-3-amino-4-(3-chlorophenyl)-butyric acid; (S)-3-amino-4-(3-cyanophenyl)-butyric acid; (S)-3-amino-4-(3-fluorophenyl)-butyric acid; (S)-3-amino-4-(3-methylphenyl)-butyric acid; (S)-3-amino-4-(3-pyridyl)-butyric acid; (S)-3-amino-4-(3-thienyl)-butyric acid; (S)-3-amino-4-(3-trifluoromethylphenyl)-butyric acid; (S)-3-amino-4-(4-bromophenyl)-butyric acid; (S)-3-amino-4-(4-chlorophenyl) butyric acid; (S)-3-amino-4-(4-cyanophenyl)-butyric acid; (S)-3-amino-4-(4-fluorophenyl) butyric acid; (S)-3-amino-4-(4-iodophenyl)-butyric acid; (S)-3-amino-4-(4-methylphenyl)-butyric acid; (S)-3-amino-4-(4-nitrophenyl)-butyric acid; (S)-3-amino-4-(4-pyridyl)-butyric acid; (S)-3-amino-4-(4-trifluoromethylphenyl)-butyric acid; (S)-3-amino-4-pentafluoro-phenylbutyric acid; (S)-3-amino-5-hexenoic acid; (S)-3-amino-5-hexynoic acid; (S)-3-amino-5-phenylpentanoic acid; (S)-3-amino-6-phenyl-5-hexenoic acid; 1,2,5,6-tetrahydropyridine-3-carboxylic acid; 1,2,5,6-tetrahydropyridine-4-carboxylic acid; 3-amino-3-(2-chlorophenyl)-propionic acid; 3-amino-3-(2-thienyl)-propionic acid; 3-amino-3-(3-bromophenyl)-propionic acid; 3-amino-3-(4-chlorophenyl)-propionic acid; 3-amino-3-(4-methoxyphenyl)-propionic acid; 3-amino-4,4,4-trifluoro-butyric acid; 3-aminoadipic acid; D-3-phenylalanine; 3-leucine; L-β-homoalanine; L-β-homoaspartic acid γ-benzyl ester; L-β-homoglutamic acid δ-benzyl ester; L-β-homoisoleucine; L-β-homoleucine; L-β-homomethionine; L-β-homophenylalanine; L-β-homoproline; L-β-homotryptophan; L-β-homovaline; L-Nω-benzyloxycarbonyl-β-homolysine; Nω-L-β-homoarginine; O-benzyl-L-β-homohydroxyproline; O-benzyl-L-O-homoserine; O-benzyl-L-β-homothreonine; O-benzyl-L-β-homotyrosine; γ-trityl-L-O-homoasparagine; (R)-β-phenylalanine; L-β-homoaspartic acid γ-t-butyl ester; L-β-homoglutamic acid δ-t-butyl ester; L-Nω-β-homolysine; Nδ-trityl-L-β-homoglutamine; No-2,2,4,6,7-pentamethyl-dihydrobenzofuran-5-sulfonyl-L-β-homoarginine; O-t-butyl-L-β-homohydroxy-proline; O-t-butyl-L-β-homoserine; O-t-butyl-L-β-homothreonine; O-t-butyl-L-β-homotyrosine; 2-aminocyclopentane carboxylic acid; and 2-aminocyclohexane carboxylic acid.

[0096] In some instances, amino acid analogs include analogs of alanine, valine, glycine, or leucine. Examples of amino acid analogs of alanine, valine, glycine, and leucine include, but are not limited to, the following: α-methoxyglycine; α-allyl-L-alanine; α-aminoisobutyric acid; α-methyl-leucine; β-(1-naphthyl)-D-alanine; β-(1-naphthyl)-L-alanine; β-(2-naphthyl)-D-alanine; β-(2-naphthyl)-L-alanine; β-(2-pyridyl)-D-alanine; β-(2-pyridyl)-L-alanine; β-(2-thienyl)-D-alanine; β-(2-thienyl)-L-alanine; β-(3-benzothienyl)-D-alanine; β-(3-benzothienyl)-L-alanine; β-(3-pyridyl)-D-alanine; β-(3-pyridyl)-L-alanine; β-(4-pyridyl)-D-alanine; β-(4-pyridyl)-L-alanine; β-chloro-L-alanine; β-cyano-L-alanin; β-cyclohexyl-D-alanine; β-cyclohexyl-L-alanine; β-cyclopenten-1-yl-alanine; β-cyclopentyl-alanine; β-cyclopropyl-L-Ala-OH.dicyclohexylammonium salt; β-t-butyl-D-alanine; β-t-butyl-L-alanine; γ-aminobutyric acid; L-α,β-diaminopropionic acid; 2,4-dinitro-phenylglycine; 2,5-dihydro-D-phenylglycine; 2-amino-4,4,4-trifluorobutyric acid; 2-fluoro-phenylglycine; 3-amino-4,4,4-trifluoro-butyric acid; 3-fluoro-valine; 4,4,4-trifluoro-valine; 4,5-dehydro-L-leu-OH.dicyclohexylammonium salt; 4-fluoro-D-phenylglycine; 4-fluoro-L-phenylglycine; 4-hydroxy-D-phenylglycine; 5,5,5-trifluoro-leucine; 6-aminohexanoic acid; cyclopentyl-D-Gly-OH.dicyclohexylammonium salt; cyclopentyl-Gly-OH.dicyclohexylammonium salt; D-α,β-diaminopropionic acid; D-α-aminobutyric acid; D-α-t-butylglycine; D-(2-thienyl)glycine; D-(3-thienyl)glycine; D-2-aminocaproic acid; D-2-indanylglycine; D-allylglycine-dicyclohexylammonium salt; D-cyclohexylglycine; D-norvaline; D-phenylglycine; β-aminobutyric acid; β-aminoisobutyric acid; (2-bromophenyl)glycine; (2-methoxyphenyl)glycine; (2-methylphenyl)glycine; (2-thiazoyl)glycine; (2-thienyl)glycine; 2-amino-3-(dimethylamino)-propionic acid; L-α,β-diaminopropionic acid; L-α-aminobutyric acid; L-α-t-butylglycine; L-(3-thienyl)glycine; L-2-amino-3-(dimethylamino)-propionic acid; L-2-aminocaproic acid dicyclohexyl-ammonium salt; L-2-indanylglycine; L-allylglycine.dicyclohexyl ammonium salt; L-cyclohexylglycine; L-phenylglycine; L-propargylglycine; L-norvaline; N-α-aminomethyl-L-alanine; D-α,γ-diaminobutyric acid; L-α,γ-diaminobutyric acid; β-cyclopropyl-L-alanine; (N-β-(2,4-dinitrophenyl))-L-α,β-diaminopropionic acid; (N-β-1-(4,4-dimethyl-2,6-dioxocyclohex-1-ylidene)ethyl)-D-α,β-diaminopropionic acid; (N-β-1-(4,4-dimethyl-2,6-dioxocyclohex-1-ylidene)ethyl)-L-α,β-diaminopropionic acid; (N-β-4-methyltrityl)-L-α,β-diaminopropionic acid; (N-β-allyloxycarbonyl)-L-α,β-diaminopropionic acid; (N-γ-1-(4,4-dimethyl-2,6-dioxocyclohex-1-ylidene)ethyl)-D-α,γ-diaminobutyric acid; (N-γ-1-(4,4-dimethyl-2,6-dioxocyclohex-1-ylidene)ethyl)-L-α,γ-diaminobutyric acid; (N-γ-4-methyltrityl)-D-α,γ-diaminobutyric acid; (N-γ-4-methyltrityl)-L-α,γ-diaminobutyric acid; (N-γ-allyloxycarbonyl)-L-α,γ-diaminobutyric acid; D-α,γ-diaminobutyric acid; 4,5-dehydro-L-leucine; cyclopentyl-D-Gly-OH; cyclopentyl-Gly-OH; D-allylglycine; D-homocyclohexylalanine; L-1-pyrenylalanine; L-2-aminocaproic acid; L-allylglycine; L-homocyclohexylalanine; and N-(2-hydroxy-4-methoxy-Bzl)-Gly-OH.

[0097] In some instances, amino acid analogs include analogs of arginine or lysine. Examples of amino acid analogs of arginine and lysine include, but are not limited to, the following: citrulline; L-2-amino-3-guanidinopropionic acid; L-2-amino-3-ureidopropionic acid; L-citrulline; Lys(Me)₂-OH; Lys(N₃)—OH; NS-benzyloxycarbonyl-L-ornithine; Nω-nitro-D-arginine; Nω-nitro-L-arginine; α-methyl-ornithine; 2,6-diaminoheptanedioic acid; L-ornithine; (Nδ-1-(4,4-dimethyl-2,6-dioxo-cyclohex-1-ylidene)ethyl)-D-ornithine; (Nδ-1-(4,4-dimethyl-2,6-dioxo-cyclohex-1-ylidene)ethyl)-L-ornithine; (Nδ-4-methyltrityl)-D-ornithine; (Nδ-4-methyltrityl)-L-omithine; D-ornithine; L-ornithine; Arg(Me)(Pbf)-OH; Arg(Me)₂-OH (asymmetrical); Arg(Me)2-OH (symmetrical); Lys(ivDde)-OH; Lys(Me)2-OH.HCl; Lys(Me3)-OH chloride; Nω-nitro-D-arginine; and Nω-nitro-L-arginine.

[0098] In some instances, amino acid analogs include analogs of aspartic or glutamic acids. Examples of amino acid analogs of aspartic and glutamic acids include, but are not limited to, the following: α-methyl-D-aspartic acid; α-methyl-glutamic acid; α-methyl-L-aspartic acid; γ-methylene-glutamic acid; (N-γ-ethyl)-L-glutamine; [N-α-(4-aminobenzoyl)]-L-glutamic acid; 2,6-diaminopimelic acid; L-α-aminosuberic acid; D-2-aminoadipic acid; D-α-aminosuberic acid; α-aminopimelic acid; iminodiacetic acid; L-2-aminoadipic acid; threo-β-methyl-aspartic acid; γ-carboxy-D-glutamic acid γ,γ-di-t-butyl ester; γ-carboxy-L-glutamic acid γ,γ-di-t-butyl ester; Glu(OAll)-OH; L-Asu(OtBu)-OH; and pyroglutamic acid.

[0099] In some instances, amino acid analogs include analogs of cysteine and methionine. Examples of amino acid analogs of cysteine and methionine include, but are not limited to, Cys(farnesyl)-OH, Cys(farnesyl)-OMe, α-methyl-methionine, Cys(2-hydroxyethyl)-OH, Cys(3-aminopropyl)-OH, 2-amino-4-(ethylthio)butyric acid, buthionine, buthioninesulfoximine, ethionine, methionine methylsulfonium chloride, selenomethionine, cysteic acid, [2-(4-pyridyl)ethyl]-DL-penicillamine, [2-(4-pyridyl)ethyl]-L-cysteine, 4-methoxybenzyl-D-penicillamine, 4-methoxybenzyl-L-penicillamine, 4-methylbenzyl-D-penicillamine, 4-methylbenzyl-L-penicillamine, benzyl-D-cysteine, benzyl-L-cysteine, benzyl-DL-homocysteine, carbamoyl-L-cysteine, carboxyethyl-L-cysteine, carboxymethyl-L-cysteine, diphenylmethyl-L-cysteine, ethyl-L-cysteine, methyl-L-cysteine, t-butyl-D-cysteine, trityl-L-homocysteine, trityl-D-penicillamine, cystathionine, homocystine, L-homocystine, (2-aminoethyl)-L-cysteine, seleno-L-cysteine, cystathionine, Cys(StBu)-OH, and acetamidomethyl-D-penicillamine.

[0100] In some instances, amino acid analogs include analogs of phenylalanine and tyrosine. Examples of amino acid analogs of phenylalanine and tyrosine include β-methyl-phenylalanine, β-hydroxyphenylalanine, α-methyl-3-methoxy-DL-phenylalanine, α-methyl-D-phenylalanine, α-methyl-L-phenylalanine, 1,2,3,4-tetrahydroisoquinoline-3-carboxylic acid, 2,4-dichloro-phenylalanine, 2-(trifluoromethyl)-D-phenylalanine, 2-(trifluoromethyl)-L-phenylalanine, 2-bromo-D-phenylalanine, 2-bromo-L-phenylalanine, 2-chloro-D-phenylalanine, 2-chloro-L-phenylalanine, 2-cyano-D-phenylalanine, 2-cyano-L-phenylalanine, 2-fluoro-D-phenylalanine, 2-fluoro-L-phenylalanine, 2-methyl-D-phenylalanine, 2-methyl-L-phenylalanine, 2-nitro-D-phenylalanine, 2-nitro-L-phenylalanine, 2;4;5-trihydroxy-phenylalanine, 3,4,5-trifluoro-D-phenylalanine, 3,4,5-trifluoro-L-phenylalanine, 3,4-dichloro-D-phenylalanine, 3,4-dichloro-L-phenylalanine, 3,4-difluoro-D-phenylalanine, 3,4-difluoro-L-phenylalanine, 3,4-dihydroxy-L-phenylalanine, 3,4-dimethoxy-L-phenylalanine, 3,5,3′-triiodo-L-thyronine, 3,5-diiodo-D-tyrosine, 3,5-diiodo-L-tyrosine, 3,5-diiodo-L-thyronine, 3-(trifluoromethyl)-D-phenylalanine, 3-(trifluoromethyl)-L-phenylalanine, 3-amino-L-tyrosine, 3-bromo-D-phenylalanine, 3-bromo-L-phenylalanine, 3-chloro-D-phenylalanine, 3-chloro-L-phenylalanine, 3-chloro-L-tyrosine, 3-cyano-D-phenylalanine, 3-cyano-L-phenylalanine, 3-fluoro-D-phenylalanine, 3-fluoro-L-phenylalanine, 3-fluoro-tyrosine, 3-iodo-D-phenylalanine, 3-iodo-L-phenylalanine, 3-iodo-L-tyrosine, 3-methoxy-L-tyrosine, 3-methyl-D-phenylalanine, 3-methyl-L-phenylalanine, 3-nitro-D-phenylalanine, 3-nitro-L-phenylalanine, 3-nitro-L-tyrosine, 4-(trifluoromethyl)-D-phenylalanine, 4-(trifluoromethyl)-L-phenylalanine, 4-amino-D-phenylalanine, 4-amino-L-phenylalanine, 4-benzoyl-D-phenylalanine, 4-benzoyl-L-phenylalanine, 4-bis(2-chloroethyl)amino-L-phenylalanine, 4-bromo-D-phenylalanine, 4-bromo-L-phenylalanine, 4-chloro-D-phenylalanine, 4-chloro-L-phenylalanine, 4-cyano-D-phenylalanine, 4-cyano-L-phenylalanine, 4-fluoro-D-phenylalanine, 4-fluoro-L-phenylalanine, 4-iodo-D-phenylalanine, 4-iodo-L-phenylalanine, homophenylalanine, thyroxine, 3,3-diphenylalanine, thyronine, ethyl-tyrosine, and methyl-tyrosine.

[0101] In some instances, amino acid analogs include analogs of proline. Examples of amino acid analogs of proline include, but are not limited to, 3,4-dehydro-proline, 4-fluoro-proline, cis-4-hydroxy-proline, thiazolidine-2-carboxylic acid, and trans-4-fluoro-proline.

[0102] In some instances, amino acid analogs include analogs of serine and threonine. Examples of amino acid analogs of serine and threonine include, but are not limited to, 3-amino-2-hydroxy-5-methylhexanoic acid, 2-amino-3-hydroxy-4-methylpentanoic acid, 2-amino-3-ethoxybutanoic acid, 2-amino-3-methoxybutanoic acid, 4-amino-3-hydroxy-6-methylheptanoic acid, 2-amino-3-benzyloxypropionic acid, 2-amino-3-benzyloxypropionic acid, 2-amino-3-ethoxypropionic acid, 4-amino-3-hydroxybutanoic acid, and α-methylserine.

[0103] In some instances, amino acid analogs include analogs of tryptophan. Examples of amino acid analogs of tryptophan include, but are not limited to, the following: α-methyl-tryptophan; β-(3-benzothienyl)-D-alanine; β-(3-benzothienyl)-L-alanine; 1-methyl-tryptophan; 4-methyl-tryptophan; 5-benzyloxy-tryptophan; 5-bromo-tryptophan; 5-chloro-tryptophan; 5-fluoro-tryptophan; 5-hydroxy-tryptophan; 5-hydroxy-L-tryptophan; 5-methoxy-tryptophan; 5-methoxy-L-tryptophan; 5-methyl-tryptophan; 6-bromo-tryptophan; 6-chloro-D-tryptophan; 6-chloro-tryptophan; 6-fluoro-tryptophan; 6-methyl-tryptophan; 7-benzyloxy-tryptophan; 7-bromo-tryptophan; 7-methyl-tryptophan; D-1,2,3,4-tetrahydro-norharman-3-carboxylic acid; 6-methoxy-1,2,3,4-tetrahydronorharman-1-carboxylic acid; 7-azatryptophan; L-1,2,3,4-tetrahydro-norharman-3-carboxylic acid; 5-methoxy-2-methyl-tryptophan; and 6-chloro-L-tryptophan.

[0104] In some instances, amino acid analogs are racemic. In some instances, the D isomer of the amino acid analog is used. In some cases, the L isomer of the amino acid analog is used. In some instances, the amino acid analog comprises chiral centers that are in the R or S configuration. Sometimes, the amino group(s) of a β-amino acid analog is substituted with a protecting group, e.g., tert-butyloxycarbonyl (BOC group), 9-fluorenylmethyloxycarbonyl (FMOC), tosyl, and the like. Sometimes, the carboxylic acid functional group of a β-amino acid analog is protected, e.g., as its ester derivative. In some cases, the salt of the amino acid analog is used.

### Cysteine-Containing Polypeptide Production

[0105] In some embodiments, a cysteine-containing polypeptide described above is generated recombinantly or is synthesized chemically. In some instances, a cysteine-containing polypeptide described above is generated recombinantly, for example, by a host cell system or in a cell-free system. In some instances, a cysteine-containing polypeptide described above is synthesized chemically.

[0106] In some embodiments, a cysteine-containing polypeptide described above is generated recombinantly by a host cell system. Exemplary host cell systems include a eukaryotic cell system (e.g., mammalian cell, insect cell, yeast cell or plant cell) or a prokaryotic cell system (e.g., gram-positive bacterium or a gram-negative bacterium).

[0107] In some embodiments, a eukaryotic host cell is a mammalian host cell. In some cases, a mammalian host cell is a stable cell line, or a cell line that has incorporated a genetic material of interest into its own genome and has the capability to express the product of the genetic material after many generations of cell division. In other cases, a mammalian host cell is a transient cell line, or a cell line that has not incorporated a genetic material of interest into its own genome and does not have the capability to express the product of the genetic material after many generations of cell division.

[0108] Exemplary mammalian host cells include 293T cell line, 293A cell line, 293FT cell line, 293F cells, 293 H cells, A549 cells, MDCK cells, CHO DG44 cells, CHO-S cells, CHO-K1 cells, Expi293F™ cells, Flp-In™ T-REx™ 293 cell line, Flp-In™-293 cell line, Flp-In™-3T3 cell line, Flp-In™-BHK cell line, Flp-In™-CHO cell line, Flp-In™-CV-1 cell line, Flp-In™-Jurkat cell line, FreeStyle™ 293-F cells, FreeStyle™ CHO-S cells, GripTite™ 293 MSR cell line, GS-CHO cell line, HepaRG™ cells, T-REx™ Jurkat cell line, Per.C6 cells, T-REx™-293 cell line, T-REx™-CHO cell line, and T-REx™-HeLa cell line.

[0109] In some embodiments, a eukaryotic host cell is an insect host cell. Exemplary insect host cell include Drosophila S2 cells, Sf9 cells, Sf21 cells, High Five™ cells, and expresSF+® cells.

[0110] In some embodiments, a eukaryotic host cell is a yeast host cell. Exemplary yeast host cells include Pichia pastoris yeast strains such as GS 115, KM71H, SMD1168, SMD1168H, and X-33, and Saccharomyces cerevisiae yeast strains such as INVSc1.

[0111] In some embodiments, a eukaryotic host cell is a plant host cell. In some instances, the plant cells comprises a cell from algae. Exemplary plant cell lines include strains from Chlamydomonas reinhardtii 137c, or Synechococcus elongatus PPC 7942.

[0112] In some embodiments, a host cell is a prokaryotic host cell. Exemplary prokaryotic host cells include BL21, Mach1™, DH10B™, TOP10, DH5α, DH10Bac™, OmniMax™, MegaX™, DH12S™, INV110, TOP10F′, INVαF, TOP10/P3, ccdB Survival, PIR1, PIR2, Stbl2™, Stbl3™, or Stbl4™.

[0113] In some instances, suitable vectors for the production of a cysteine-containing polypeptide include any suitable vectors derived from either a eukaryotic or prokaryotic sources. Exemplary vectors include vectors from bacteria (e.g., E. coli), insects, yeast (e.g., Pichia pastoris), algae, or mammalian source. Bacterial vectors include, for example, pACYC177, pASK75, pBAD vector series, pBADM vector series, pET vector series, pETM vector series, pGEX vector series, pHAT, pHAT2, pMal-c2, pMal-p2, pQE vector series, pRSET A, pRSET B, pRSET C, pTrcHis2 series, pZA31-Luc, pZE21-MCS-1, pFLAG ATS, pFLAG CTS, pFLAG MAC, pFLAG Shift-12c, pTAC-MAT-1, pFLAG CTC, or pTAC-MAT-2.

[0114] Insect vectors include, for example, pFastBac1, pFastBac DUAL, pFastBac ET, pFastBac HTa, pFastBac HTb, pFastBac HTc, pFastBac M30a, pFastBact M30b, pFastBac, M30c, pVL1392, pVL1393, pVL1393 M10, pVL1393 M11, pVL1393 M12, FLAG vectors such as pPolh-FLAG1 or pPolh-MAT 2, or MAT vectors such as pPolh-MAT1, or pPolh-MAT2.

[0115] Yeast vectors include, for example, Gateway® pDEST™ 14 vector, Gateway® pDEST™ 15 vector, Gateway® pDEST™ 17 vector, Gateway® pDEST™ 24 vector, Gateway® pYES-DEST52 vector, pBAD-DEST49 Gateway® destination vector, pAO815 Pichia vector, pFLD1 Pichi pastoris vector, pGAPZA, B, & C Pichia pastoris vector, pPIC3.5K Pichia vector, pPIC6 A, B, & C Pichia vector, pPIC9K Pichia vector, pTEF1/Zeo, pYES2 yeast vector, pYES2/CT yeast vector, pYES2/NT A, B, & C yeast vector, or pYES3/CT yeast vector.

[0116] Algae vectors include, for example, pChlamy-4 vector or MCS vector.

[0117] Mammalian vectors include, for example, transient expression vectors or stable expression vectors. Exemplary mammalian transient expression vectors include p3×FLAG-CMV 8, pFLAG-Myc-CMV 19, pFLAG-Myc-CMV 23, pFLAG-CMV 2, pFLAG-CMV 6a,b,c, pFLAG-CMV 5.1, pFLAG-CMV 5a,b,c, p3×FLAG-CMV 7.1, pFLAG-CMV 20, p3×FLAG-Myc-CMV 24, pCMV-FLAG-MAT1, pCMV-FLAG-MAT2, pBICEP-CMV 3, or pBICEP-CMV 4. Exemplary mammalian stable expression vectors include pFLAG-CMV 3, p3×FLAG-CMV 9, p3×FLAG-CMV 13, pFLAG-Myc-CMV 21, p3×FLAG-Myc-CMV 25, pFLAG-CMV 4, p3×FLAG-CMV 10, p3×FLAG-CMV 14, pFLAG-Myc-CMV 22, p3×FLAG-Myc-CMV 26, pBICEP-CMV 1, or pBICEP-CMV 2.

[0118] In some instances, a cell-free system is used for the production of a cysteine-containing polypeptide. In some cases, a cell-free system comprises a mixture of cytoplasmic and/or nuclear components from a cell and is suitable for in vitro nucleic acid synthesis. In some instances, a cell-free system utilizes prokaryotic cell components. In other instances, a cell-free system utilizes eukaryotic cell components. Nucleic acid synthesis is obtained in a cell-free system based on, for example, Drosophila cell, Xenopus egg, or HeLa cells. Exemplary cell-free systems include E. coli S30 Extract system, E. coli T7 S30 system, or PURExpress®.

### Methods of Use

[0119] In some embodiments, disclosed herein include methods of modulating an immune response in a subject. In some embodiments, disclosed herein is a method of modulating an immune response in a subject, which comprises administering to the subject a therapeutically effective amount of a small molecule fragment of Formula (I):

[chemical structure]

[0120] wherein:
[0121] RM is a reactive moiety selected from a Michael acceptor moiety, a leaving group moiety, or a moiety capable of forming a covalent bond with the thiol group of a cysteine residue; and
[0122] F is a small molecule fragment moiety.

[0123] In some embodiments, the small molecule fragment interacts with an endogenous cysteine-containing polypeptide expressed in the subject to form a cysteine-containing polypeptide-small molecule fragment adduct. In some instances, the cysteine-containing polypeptide-small molecule fragment adduct comprises a covalent bonding. In some cases, the cysteine-containing polypeptide-small molecule fragment adduct comprises an irreversible bonding. In other cases, the cysteine-containing polypeptide-small molecule fragment adduct comprises a reversible bonding. In some instances, an endogenous cysteine-containing polypeptide is a polypeptide that is expressed or present in a cell of interest (e.g., a diseased cell such as a cancerous cell). In some instances, an endogenous cysteine-containing polypeptide is a polypeptide that is overexpressed in a cell of interest (e.g., a diseased cell such as a cancerous cell). In some instances, an endogenous cysteine-containing polypeptide is a polypeptide that harbors one or more mutations in a cell of interest (e.g., a diseased cell such as a cancerous cell). In some instances, a mutation comprises a missense mutation, an insertion, or a deletion. In some instances, a mutation comprises a truncation, for example, a truncation at the N-terminus or the C-terminus of the polypeptide. In additional instances, an endogenous cysteine-containing polypeptide is a polypeptide that has an altered conformation in a cell of interest (e.g., a diseased cell such as a cancerous cell) relative to the conformation of the wild-type polypeptide.

[0124] In some instances, a cysteine-containing polypeptide-small molecule fragment adduct induces an immune response. In some cases, the immune response is a humoral immune response. In other cases, the immune response is a cell-mediated immune response. In some instances, the cysteine-containing polypeptide-small molecule fragment adduct induces a humoral immune response. In some instances, a cysteine-containing polypeptide-small molecule fragment adduct induces a cell-mediated immune response. In additional instances, a cysteine-containing polypeptide-small molecule fragment adduct induces a humoral immune response and a cell-mediated immune response. In some instances, humoral immunity (or antibody-mediated beta cellularis immune system) is the production of antibody and its accessory processes such as Th2 activation, cytokine production, germinal center formation, isotype switching, affinity maturation, and memory cell generation. In some instances, humoral immunity is mediated by macromolecules in the extracellular fluids. In some cases, cell-mediated immunity comprises activation of phagocytes, antigen-specific cytotoxic T-lymphocytes, and release of cytokines in response to an antigen. In some cases, cell-mediated immunity differs from humoral immunity in that it does not involve production of antibody.

[0125] In some embodiments, a cysteine-containing polypeptide-small molecule fragment adduct increases an immune response relative to a control. In some cases, a cysteine-containing polypeptide-small molecule fragment adduct increases a humoral immune response relative to a control. In additional cases, a cysteine-containing polypeptide-small molecule fragment adduct increases a cell-mediated immune response relative to a control. In additional cases, a cysteine-containing polypeptide-small molecule fragment adduct increases a humoral immune response and a cell-mediated immune response relative to a control.

[0126] In some cases, a control is the level of an immune response in the subject prior to administration of the small molecule fragment or is the level of an immune response in a subject who has not been exposed to the small molecule fragment. In some cases, a control is the level of a humoral immune response or a cell-mediated immune response in the subject prior to administration of the small molecule fragment or is the level of a humoral immune response or a cell-mediated immune response in a subject who has not been exposed to the small molecule fragment.

[0127] In some instances, a cysteine-containing polypeptide-small molecule fragment adduct modulates an immune response. In some cases, the immune response is a humoral immune response. In other cases, the immune response is a cell-mediated immune response. In some instances, the cysteine-containing polypeptide-small molecule fragment adduct modulates a humoral immune response. In some instances, a cysteine-containing polypeptide-small molecule fragment adduct modulates a cell-mediated immune response. In additional instances, a cysteine-containing polypeptide-small molecule fragment adduct modulates a humoral immune response and a cell-mediated immune response.

[0128] In some instances, a cysteine-containing polypeptide is a non-denatured form of the polypeptide.

[0129] In some instances, a cysteine-containing polypeptide comprises a biologically active cysteine site. As described above and elsewhere herein, in some cases, a biologically active cysteine site is a cysteine residue that is located about 10 Å or less to an active-site ligand or residue. In other cases, a biologically active cysteine site is a cysteine residue that is located greater than 10 Å from an active-site ligand or residue. In some cases, the cysteine residue that is located greater than 10 Å from the active-site ligand or residue is a non-active site cysteine.

[0130] Further as described elsewhere herein, a cysteine-containing polypeptide comprises, in some instances, an enzyme, a transporter, a receptor, a channel protein, an adaptor protein, a chaperone, a signaling protein, a plasma protein, transcription related protein, translation related protein, mitochondrial protein, or cytoskeleton related protein. In some cases, the cysteine-containing polypeptide comprises an enzyme, a transporter, a receptor, a channel protein, an adaptor protein, a chaperone, a signaling protein, transcription related protein, or translation related protein.

[0131] In some embodiments, a cysteine-containing polypeptide is about 20, 30, 35, 40, 45, 50, 55, 60, 65, 70, 75, 80, 85, 90, 95, 100, 150, 200, 250, 300, 350, 400, 450, 500, 600, 700, 800, 900, 1000, 1100, 1200, 1500, 2000, 2100, 2200, 2500 amino acid residues in length or more. In some cases, a cysteine-containing polypeptide is about 20 amino acid residues in length or more. In some cases, a cysteine-containing polypeptide is about 60 amino acid residues in length or more. In some cases, a cysteine-containing polypeptide is about 70 amino acid residues in length or more. In some cases, a cysteine-containing polypeptide is about 80 amino acid residues in length or more. In some cases, a cysteine-containing polypeptide is about 90 amino acid residues in length or more. In some cases, a cysteine-containing polypeptide is about 100 amino acid residues in length or more. In some cases, a cysteine-containing polypeptide is about 150 amino acid residues in length or more. In some cases, a cysteine-containing polypeptide is about 200 amino acid residues in length or more. In some cases, a cysteine-containing polypeptide is about 300 amino acid residues in length or more. In some cases, a cysteine-containing polypeptide is about 400 amino acid residues in length or more. In some cases, a cysteine-containing polypeptide is about 500 amino acid residues in length or more. In some cases, a cysteine-containing polypeptide is about 800 amino acid residues in length or more. In some cases, a cysteine-containing polypeptide is about 1000 amino acid residues in length or more. In some cases, a cysteine-containing polypeptide is about 1500 amino acid residues in length or more.

[0132] In some instances, a cysteine-containing polypeptide comprises a protein illustrated in Tables 1-5. In some cases, a cysteine-containing polypeptide comprises a protein illustrated in Table 1. In some cases, a cysteine-containing polypeptide comprises a protein illustrated in Table 2. In some cases, a cysteine-containing polypeptide comprises a protein illustrated in Table 3. In some cases, a cysteine-containing polypeptide comprises a protein illustrated in Table 4. In some cases, a cysteine-containing polypeptide comprises a protein illustrated in Table 5. In some instances, the cysteine residue of interest is denoted by a (*) in Tables 1-5.

[0133] In some instances, a cysteine-containing polypeptide comprises a protein illustrated in Tables 6A-6E. In some cases, a cysteine-containing polypeptide comprises a protein illustrated in Table 6A. In some cases, a cysteine-containing polypeptide comprises a protein illustrated in Table 6B. In some cases, a cysteine-containing polypeptide comprises a protein illustrated in Table 6C. In some cases, a cysteine-containing polypeptide comprises a protein illustrated in Table 6D. In some cases, a cysteine-containing polypeptide comprises a protein illustrated in Table 6E.

[0134] In some embodiments, as described above, a small molecule fragment comprises a Michael acceptor moiety which comprises an alkene or an alkyne moiety. In some instances, a covalent bond is formed between a portion of the Michael acceptor moiety on the small molecule fragment and a portion of a cysteine residue of the cysteine-containing polypeptide.

[0135] In some instances, a small molecule fragment comprises a small molecule fragment moiety F which is obtained from a compound library. In some instances, the compound library comprises ChemBridge fragment library, Pyramid Platform Fragment-Based Drug Discovery, Maybridge fragment library, FRGx from AnalytiCon, TCI-Frag from AnCoreX, Bio Building Blocks from ASINEX, BioFocus 3D from Charles River, Fragments of Life (FOL) from Emerald Bio, Enamine Fragment Library, IOTA Diverse 1500, BIONET fragments library, Life Chemicals Fragments Collection, OTAVA fragment library, Prestwick fragment library, Selcia fragment library, TimTec fragment-based library, Allium from Vitas-M Laboratory, or Zenobia fragment library. In some cases, F is a small molecule fragment moiety illustrated in FIG. 1 (e.g., FIG. 1A and/or FIG. 1B). In some cases, the small molecule fragment is a small molecule fragment illustrated in FIG. 1 (e.g., FIG. 1A and/or FIG. 1B).

[0136] In some instances, a small molecule fragment has a molecular weight of about 150 Dalton or higher. In some cases, a small molecular fragment has a molecular weight of about 175, 200, 225, 250, 275, 300, 350, 400, 450, 500, 550, 600, 650, 700, 750, 800, 850, 900, 950, 1000 Dalton, or higher. In some cases, a molecular weight of the small molecular fragment is prior to enrichment with a halogen, a nonmetal, or a transition metal. In some cases, a small molecular fragment of Formula (I) has a molecular weight of about 150, 175, 200, 225, 250, 275, 300, 350, 400, 450, 500, 550, 600, 650, 700, 750, 800, 850, 900, 950, 1000 Dalton, or higher.

[0137] In some instances, the method further comprises administration of a cysteine-containing polypeptide-small molecule fragment adduct. In some instances, the cysteine-containing polypeptide comprises an isolated and purified polypeptide comprising at least 80%, 85%, 90%, 95%, 96%, 97%, 98%, or 99% sequence identity to at least seven contiguous amino acids of an amino acid sequence selected from SEQ ID NOs: 1-9655. In some cases, the cysteine-containing polypeptide-small molecule fragment adduct further enhances or increases an immune response. In some instances, an enhancement or an increase of the immune response is relative to a level of the immune response prior to administration of the cysteine-containing polypeptide-small molecule fragment adduct.

[0138] In some embodiments, disclosed herein is a derivative of cereblon protein having the structure of Formula (I),

[chemical structure]

[0139] wherein,
   [0140] the derivation occurs at cereblon cysteine residue position 188 based on SEQ ID NO: 9665;
   [0141] R is selected from:

[chemical structure]

[0142] wherein R¹ is H, C1-C3 alkyl, or aryl; and
[0143] F′ is a small molecule fragment moiety.

[0144] In some embodiments, F′ has a molecular weight of about 175, 200, 225, 250, 275, 300, 350, 400, 450, 500, 550, 600, 650, 700, 750, 800, 850, 900, 950, 1000 Dalton, or higher. In some embodiments, the molecular weight of F′ is prior to enrichment with a halogen, a nonmetal, or a transition metal. In some embodiments, F′ is a small molecule fragment moiety illustrated in FIG. 1 (e.g., FIG. 1A and/or FIG. 1B).

[0145] In some embodiments, disclosed herein is a derivative of cereblon protein having the structure of Formula (I),

[chemical structure]

[0146] wherein,
   [0147] the derivation occurs at cereblon cysteine residue position 287 based on SEQ ID NO: 9665;
   [0148] R is selected from:

[chemical structure]

[0149] wherein R¹ is H, C1-C3 alkyl, or aryl; and
[0150] F′ is a small molecule fragment moiety.

[0151] In some embodiments, F′ has a molecular weight of about 175, 200, 225, 250, 275, 300, 350, 400, 450, 500, 550, 600, 650, 700, 750, 800, 850, 900, 950, 1000 Dalton, or higher. In some embodiments, the molecular weight of F′ is prior to enrichment with a halogen, a nonmetal, or a transition metal. In some embodiments, F′ is a small molecule fragment moiety illustrated in FIG. 1 (e.g., FIG. 1A and/or FIG. 1B).

[0152] In some cases, the method further comprises administration of an adjuvant.

[0153] In some cases, the small molecule fragment is formulated for parenteral, oral, or intranasal administration.

### Diseases or Indications

[0154] In some embodiments, disclosed herein include a method of administrating a small molecule fragment to a subject in which the small molecule fragment interacts with an endogenous cysteine-containing polypeptide expressed in the subject to form a cysteine-containing polypeptide-small molecule fragment adduct. In some embodiments, the cysteine-containing polypeptide is overexpressed in a disease or condition. In some cases, the overexpressed cysteine-containing polypeptide comprises one or more mutations. In some cases, the cysteine-containing polypeptide comprising one or more mutations is overexpressed in a disease or condition.

[0155] In some instances, the disease or condition is cancer. In some cases, the cysteine-containing polypeptide is a cancer-associated protein. In some cases, the cysteine-containing polypeptide is overexpressed in a cancer. In some cases, the cysteine-containing polypeptide comprising one or more mutations is overexpressed in a cancer. In some instances, a mutation comprises a missense mutation, an insertion, or a deletion. In some instances, a mutation comprises a truncation at a terminus of a protein. In some instances, a mutation alters the conformation of a protein relative to the conformation of its wild-type protein. In additional instances, a mutation does not alter the conformation of a protein.

[0156] In some instances, a cancer is a solid tumor. In some instances, a cancer is a hematologic malignancy. In some instances, a cancer is a relapsed or refractory cancer, or a metastatic cancer. In some instances, a solid tumor is a relapsed or refractory solid tumor, or a metastatic solid tumor. In some cases, a hematologic malignancy is a relapsed or refractory hematologic malignancy, or a metastatic hematologic malignancy.

[0157] In some embodiments, a cancer is a solid tumor. Exemplary solid tumor includes, but is not limited to, anal cancer, appendix cancer, bile duct cancer (i.e., cholangiocarcinoma), bladder cancer, brain tumor, breast cancer, cervical cancer, colon cancer, cancer of Unknown Primary (CUP), esophageal cancer, eye cancer, fallopian tube cancer, gastroenterological cancer, kidney cancer, liver cancer, lung cancer, medulloblastoma, melanoma, oral cancer, ovarian cancer, pancreatic cancer, parathyroid disease, penile cancer, pituitary tumor, prostate cancer, rectal cancer, skin cancer, stomach cancer, testicular cancer, throat cancer, thyroid cancer, uterine cancer, vaginal cancer or vulvar cancer.

[0158] In some embodiments, a cysteine-containing polypeptide described herein that is overexpressed and/or comprises one or more mutations is present in a solid tumor. In some cases, a cysteine-containing polypeptide described herein that is overexpressed and/or comprises one or more mutations is present in metastatic solid tumor. In some cases, a cysteine-containing polypeptide described herein that is overexpressed and/or comprises one or more mutations is present in a relapsed or refractory solid tumor. In some instances, a small molecule fragment described herein interacts with a cysteine-containing polypeptide that is present, overexpressed, and/or comprises a mutation in a solid tumor.

[0159] In some instances, a cancer is a hematologic malignancy. In some instances, a hematologic malignancy is a leukemia, a lymphoma, a myeloma, a non-Hodgkin's lymphoma, or a Hodgkin's lymphoma. In some instances, a hematologic malignancy comprises chronic lymphocytic leukemia (CLL), small lymphocytic lymphoma (SLL), high risk CLL, a non-CLL/SLL lymphoma, prolymphocytic leukemia (PLL), follicular lymphoma (FL), diffuse large B-cell lymphoma (DLBCL), mantle cell lymphoma (MCL), Waldenstrom's macroglobulinemia, multiple myeloma, extranodal marginal zone B cell lymphoma, nodal marginal zone B cell lymphoma, Burkitt's lymphoma, non-Burkitt high grade B cell lymphoma, primary mediastinal B-cell lymphoma (PMBL), immunoblastic large cell lymphoma, precursor B-lymphoblastic lymphoma, B cell prolymphocytic leukemia, lymphoplasmacytic lymphoma, splenic marginal zone lymphoma, plasma cell myeloma, plasmacytoma, mediastinal (thymic) large B cell lymphoma, intravascular large B cell lymphoma, primary effusion lymphoma, or lymphomatoid granulomatosis.

[0160] In some embodiments, a cysteine-containing polypeptide described herein that is overexpressed and/or comprises one or more mutations is present in a hematologic malignancy. In some cases, a cysteine-containing polypeptide described herein that is overexpressed and/or comprises one or more mutations is present in metastatic hematologic malignancy. In some cases, a cysteine-containing polypeptide described herein that is overexpressed and/or comprises one or more mutations is present in a relapsed or refractory hematologic malignancy. In some instances, a small molecule fragment described herein interacts with a cysteine-containing polypeptide that is present, overexpressed, and/or comprises a mutation in a hematologic malignancy.

### Vaccines

[0161] In some embodiments, disclosed herein include vaccines and vaccine formulations that comprises a small molecule fragment described herein, an antibody that recognizes a cysteine-containing polypeptide-small molecule fragment adduct described herein, or a cysteine-containing polypeptide-small molecule fragment adduct described herein. In some embodiments, disclosed herein is a vaccine that comprises a small molecule fragment described herein. In some embodiments, disclosed herein is a vaccine that comprises an antibody that recognizes a cysteine-containing polypeptide-small molecule fragment adduct described herein. In some embodiments, disclosed herein is a vaccine that comprises a cysteine-containing polypeptide-small molecule fragment adduct described herein.

[0162] In some instances, a cysteine-containing polypeptide is an enzyme, a transporter, a receptor, a channel protein, an adaptor protein, a chaperone, a signaling protein, a plasma protein, transcription related protein, translation related protein, mitochondrial protein, or cytoskeleton related protein. In some cases, the cysteine-containing polypeptide is an enzyme, a transporter, a receptor, a channel protein, an adaptor protein, a chaperone, a signaling protein, transcription related protein, or translation related protein.

[0163] In some instances, a cysteine-containing polypeptide comprises a protein illustrated in Tables 1-6. In some cases, a cysteine-containing polypeptide comprises a protein illustrated in Table 1. In some cases, a cysteine-containing polypeptide comprises a protein illustrated in Table 2. In some cases, a cysteine-containing polypeptide comprises a protein illustrated in Table 3. In some cases, a cysteine-containing polypeptide comprises a protein illustrated in Table 4. In some cases, a cysteine-containing polypeptide comprises a protein illustrated in Table 5. In some cases, a cysteine-containing polypeptide comprises a protein illustrated in Table 6 (e.g., Tables 6A-6E).

[0164] In some embodiments, a small molecule fragment comprises a Michael acceptor moiety which comprises an alkene or an alkyne moiety. In some instances, a covalent bond is formed between a portion of the Michael acceptor moiety on the small molecule fragment and a portion of a cysteine residue of the cysteine-containing polypeptide.

[0165] In some instances, a small molecule fragment comprises a small molecule fragment moiety F which is obtained from a compound library. In some instances, the compound library comprises ChemBridge fragment library, Pyramid Platform Fragment-Based Drug Discovery, Maybridge fragment library, FRGx from AnalytiCon, TCI-Frag from AnCoreX, Bio Building Blocks from ASINEX, BioFocus 3D from Charles River, Fragments of Life (FOL) from Emerald Bio, Enamine Fragment Library, IOTA Diverse 1500, BIONET fragments library, Life Chemicals Fragments Collection, OTAVA fragment library, Prestwick fragment library, Selcia fragment library, TimTec fragment-based library, Allium from Vitas-M Laboratory, or Zenobia fragment library. In some cases, F is a small molecule fragment moiety illustrated in FIG. 1 (e.g., FIG. 1A and/or FIG. 1B). In some cases, the small molecule fragment is a small molecule fragment illustrated in FIG. 1 (e.g., FIG. 1A and/or FIG. 1B).

[0166] In some instances, a small molecule fragment has a molecular weight of about 150 Dalton or higher. In some cases, a small molecular fragment has a molecular weight of about 175, 200, 225, 250, 275, 300, 350, 400, 450, 500, 550, 600, 650, 700, 750, 800, 850, 900, 950, 1000 Dalton, or higher. In some cases, the molecular weight of the small molecular fragment is prior to enrichment with a halogen, a nonmetal, or a transition metal. In some cases, the small molecular fragment of Formula (I) has a molecular weight of about 150, 175, 200, 225, 250, 275, 300, 350, 400, 450, 500, 550, 600, 650, 700, 750, 800, 850, 900, 950, 1000 Dalton, or higher.

[0167] In some instances, a vaccine is formulated in a conventional manner using one or more physiologically acceptable carriers including excipients and auxiliaries which facilitate processing of the active agents into preparations which are used pharmaceutically. Proper formulation is dependent upon the route of administration chosen. Any of the well-known techniques, carriers, and excipients are used as suitable and as understood in the art.

[0168] In some instances, a vaccine is further formulated with a cysteine-containing polypeptide-small molecule fragment adduct. In some instances, a cysteine-containing polypeptide-small molecule fragment adduct enhances an immune response. In some instances, the cysteine-containing polypeptide comprises an isolated and purified polypeptide comprising at least 80%, 85%, 90%, 95%, 96%, 97%, 98%, or 99% sequence identity to at least seven contiguous amino acids of an amino acid sequence selected from SEQ ID NOs: 1-9655.

[0169] In some embodiments, disclosed herein is a vaccine comprising an antibody or its binding fragment thereof that recognizes a derivative of a cysteine-containing protein having the structure of Formula (I),

[chemical structure]

[0170] wherein,
   [0171] the derivation occurs at a cysteine residue;
   [0172] R is selected from:

[chemical structure]

[0173] wherein R¹ is H, C1-C3 alkyl, or aryl; and

[0174] F′ is a small molecule fragment moiety.

[0175] In some embodiments, F′ has a molecular weight of about 175, 200, 225, 250, 275, 300, 350, 400, 450, 500, 550, 600, 650, 700, 750, 800, 850, 900, 950, 1000 Dalton, or higher. In some embodiments, the molecular weight of F′ is prior to enrichment with a halogen, a nonmetal, or a transition metal. In some embodiments, F′ is a small molecule fragment moiety illustrated in FIG. 1 (e.g., FIG. 1A and/or FIG. 1B).

[0176] In some embodiments, disclosed herein is a vaccine comprising an antibody or its binding fragment thereof that recognizes a derivative of IDH1 protein having the structure of Formula (I),

[chemical structure]

[0177] wherein,
   [0178] the derivation occurs at IDH1 cysteine residue position 269 based on SEQ ID NO: 9656;
   [0179] R is selected from:

[chemical structure]

[0180] wherein R¹ is H, C1-C3 alkyl, or aryl; and
[0181] F′ is a small molecule fragment moiety.

[0182] In some embodiments, F′ has a molecular weight of about 175, 200, 225, 250, 275, 300, 350, 400, 450, 500, 550, 600, 650, 700, 750, 800, 850, 900, 950, 1000 Dalton, or higher. In some embodiments, the molecular weight of F′ is prior to enrichment with a halogen, a nonmetal, or a transition metal. In some embodiments, F′ is a small molecule fragment moiety illustrated in FIG. 1 (e.g., FIG. 1A and/or FIG. 1B).

[0183] In some embodiments, disclosed herein is a vaccine comprising an antibody or its binding fragment thereof that recognizes a derivative of IDH2 protein having the structure of Formula (I),

[chemical structure]

[0184] wherein,
[0185] the derivation occurs at IDH2 cysteine residue position 308 based on SEQ ID NO: 9657;
[0186] R is selected from:

[chemical structure]

[0187] wherein R is H, C1-C3 alkyl, or aryl; and

[0188] F′ is a small molecule fragment moiety.

[0189] In some embodiments, F′ has a molecular weight of about 175, 200, 225, 250, 275, 300, 350, 400, 450, 500, 550, 600, 650, 700, 750, 800, 850, 900, 950, 1000 Dalton, or higher. In some embodiments, the molecular weight of F′ is prior to enrichment with a halogen, a nonmetal, or a transition metal. In some embodiments, F′ is a small molecule fragment moiety illustrated in FIG. 1 (e.g., FIG. 1A and/or FIG. 1B).

[0190] In some embodiments, disclosed herein is a vaccine comprising an antibody or its binding fragment thereof that recognizes a derivative of caspase-8 protein having the structure of Formula (I),

[chemical structure]

[0191] wherein,
[0192] the derivation occurs at caspase-8 cysteine residue position 360 based on SEQ ID NO: 9658;
[0193] R is selected from:

[chemical structure]

[0194] wherein R is H, C1-C3 alkyl, or aryl; and

[0195] F′ is a small molecule fragment moiety.

[0196] In some embodiments, F′ has a molecular weight of about 175, 200, 225, 250, 275, 300, 350, 400, 450, 500, 550, 600, 650, 700, 750, 800, 850, 900, 950, 1000 Dalton, or higher. In some embodiments, the molecular weight of F′ is prior to enrichment with a halogen, a nonmetal, or a transition metal. In some embodiments, F′ is a small molecule fragment moiety illustrated in FIG. 1 (e.g., FIG. 1A and/or FIG. 1B).

[0197] In some embodiments, disclosed herein is a vaccine comprising an antibody or its binding fragment thereof that recognizes a derivative of caspase-10 protein having the structure of Formula (I),

[chemical structure]

[0198] wherein,
[0199] the derivation occurs at caspase-10 cysteine residue position 401 based on SEQ ID NO: 9659;
[0200] R is selected from:

[chemical structure]

[0201] wherein R¹ is H, C1-C3 alkyl, or aryl; and

[0202] F′ is a small molecule fragment moiety.

[0203] In some embodiments, F′ has a molecular weight of about 175, 200, 225, 250, 275, 300, 350, 400, 450, 500, 550, 600, 650, 700, 750, 800, 850, 900, 950, 1000 Dalton, or higher. In some embodiments, the molecular weight of F′ is prior to enrichment with a halogen, a nonmetal, or a transition metal. In some embodiments, F′ is a small molecule fragment moiety illustrated in FIG. 1 (e.g., FIG. 1A and/or FIG. 1B).

[0204] In some embodiments, disclosed herein is a vaccine comprising an antibody or its binding fragment thereof that recognizes a derivative of PRMT-1 protein having the structure of Formula (I),

[chemical structure]

[0205] wherein,
[0206] the derivation occurs at PRMT-1 cysteine residue position 109 based on SEQ ID NO: 9660;
[0207] R is selected from:

[chemical structure]

[0208] wherein R¹ is H, C1-C3 alkyl, or aryl; and

[0209] F′ is a small molecule fragment moiety.

[0210] In some embodiments, F′ has a molecular weight of about 175, 200, 225, 250, 275, 300, 350, 400, 450, 500, 550, 600, 650, 700, 750, 800, 850, 900, 950, 1000 Dalton, or higher. In some embodiments, the molecular weight of F′ is prior to enrichment with a halogen, a nonmetal, or a transition metal. In some embodiments, F′ is a small molecule fragment moiety illustrated in FIG. 1 (e.g., FIG. 1A and/or FIG. 1B).

[0211] In some embodiments, disclosed herein is a vaccine comprising an antibody or its binding fragment thereof that recognizes a derivative of ZAK protein having the structure of Formula (I),

[chemical structure]

[0212] wherein,
[0213] the derivation occurs at ZAK cysteine residue position 22 based on SEQ ID NO: 9661;
[0214] R is selected from:

[chemical structure]

[0215] wherein R¹ is H, C1-C3 alkyl, or aryl; and

[0216] F′ is a small molecule fragment moiety.

[0217] In some embodiments, F′ has a molecular weight of about 175, 200, 225, 250, 275, 300, 350, 400, 450, 500, 550, 600, 650, 700, 750, 800, 850, 900, 950, 1000 Dalton, or higher. In some embodiments, the molecular weight of F′ is prior to enrichment with a halogen, a nonmetal, or a transition metal. In some embodiments, F′ is a small molecule fragment moiety illustrated in FIG. 1 (e.g., FIG. 1A and/or FIG. 1B).

[0218] In some embodiments, disclosed herein is a vaccine comprising an antibody or its binding fragment thereof that recognizes a derivative of IMPDH2 protein having the structure of Formula (I),

[chemical structure]

[0219] wherein,
[0220] the derivation occurs at IMPDH2 cysteine residue position 140 based on SEQ ID NO: 9662;
[0221] R is selected from:

[chemical structure]

[0222] wherein R¹ is H, C1-C3 alkyl, or aryl; and

[0223] F′ is a small molecule fragment moiety.

[0224] In some embodiments, F′ has a molecular weight of about 175, 200, 225, 250, 275, 300, 350, 400, 450, 500, 550, 600, 650, 700, 750, 800, 850, 900, 950, 1000 Dalton, or higher. In some embodiments, the molecular weight of F′ is prior to enrichment with a halogen, a nonmetal, or a transition metal. In some embodiments, F′ is a small molecule fragment moiety illustrated in FIG. 1 (e.g., FIG. 1A and/or FIG. 1B).

[0225] In some embodiments, disclosed herein is a vaccine comprising an antibody or its binding fragment thereof that recognizes a derivative of IMPDH2 protein having the structure of Formula (I),

[chemical structure]

[0226] wherein,
[0227] the derivation occurs at IMPDH2 cysteine residue position 331 based on SEQ ID NO: 9662;
[0228] R is selected from:

[chemical structure]

[0229] wherein R¹ is H, C1-C3 alkyl, or aryl; and

[0230] F′ is a small molecule fragment moiety.

[0231] In some embodiments, F′ has a molecular weight of about 175, 200, 225, 250, 275, 300, 350, 400, 450, 500, 550, 600, 650, 700, 750, 800, 850, 900, 950, 1000 Dalton, or higher. In some embodiments, the molecular weight of F′ is prior to enrichment with a halogen, a nonmetal, or a transition metal. In some embodiments, F′ is a small molecule fragment moiety illustrated in FIG. 1 (e.g., FIG. 1A and/or FIG. 1B).

[0232] In some embodiments, disclosed herein is a vaccine comprising an antibody or its binding fragment thereof that recognizes a derivative of TIGAR protein having the structure of Formula (I),

[chemical structure]

[0233] wherein,
[0234] the derivation occurs at TIGAR cysteine residue position 114 based on SEQ ID NO: 9663;
[0235] R is selected from:

[chemical structure]

[0236] wherein R¹ is H, C1-C3 alkyl, or aryl; and

[0237] F′ is a small molecule fragment moiety.

[0238] In some embodiments, F′ has a molecular weight of about 175, 200, 225, 250, 275, 300, 350, 400, 450, 500, 550, 600, 650, 700, 750, 800, 850, 900, 950, 1000 Dalton, or higher. In some embodiments, the molecular weight of F′ is prior to enrichment with a halogen, a nonmetal, or a transition metal. In some embodiments, F′ is a small molecule fragment moiety illustrated in FIG. 1 (e.g., FIG. 1A and/or FIG. 1B).

[0239] In some embodiments, disclosed herein is a vaccine comprising an antibody or its binding fragment thereof that recognizes a derivative of TIGAR protein having the structure of Formula (I),

[chemical structure]

[0240] wherein,
   [0241] the derivation occurs at TIGAR cysteine residue position 161 based on SEQ ID NO: 9663;
   [0242] R is selected from:

[chemical structure]

[0243] wherein R¹ is H, C1-C3 alkyl, or aryl; and

[0244] F′ is a small molecule fragment moiety.

[0245] In some embodiments, F′ has a molecular weight of about 175, 200, 225, 250, 275, 300, 350, 400, 450, 500, 550, 600, 650, 700, 750, 800, 850, 900, 950, 1000 Dalton, or higher. In some embodiments, the molecular weight of F′ is prior to enrichment with a halogen, a nonmetal, or a transition metal. In some embodiments, F′ is a small molecule fragment moiety illustrated in FIG. 1 (e.g., FIG. 1A and/or FIG. 1B).

[0246] In some embodiments, disclosed herein is a vaccine comprising an antibody or its binding fragment thereof that recognizes a derivative of PKCθ protein having the structure of Formula (I),

[chemical structure]

[0247] wherein,
[0248] the derivation occurs at PKCθ cysteine residue position 14 based on SEQ ID NO: 9664;
[0249] R is selected from:

[chemical structure]

[0250] wherein R¹ is H, C1-C3 alkyl, or aryl; and

[0251] F′ is a small molecule fragment moiety.

[0252] In some embodiments, F′ has a molecular weight of about 175, 200, 225, 250, 275, 300, 350, 400, 450, 500, 550, 600, 650, 700, 750, 800, 850, 900, 950, 1000 Dalton, or higher. In some embodiments, the molecular weight of F′ is prior to enrichment with a halogen, a nonmetal, or a transition metal. In some embodiments, F′ is a small molecule fragment moiety illustrated in FIG. 1 (e.g., FIG. 1A and/or FIG. 1B).

[0253] In some embodiments, disclosed herein is a vaccine comprising an antibody or its binding fragment thereof that recognizes a derivative of PKCθ protein having the structure of Formula (I),

[chemical structure]

[0254] wherein,
[0255] the derivation occurs at PKCθ cysteine residue position 17 based on SEQ ID NO: 9664;
[0256] R is selected from:

[chemical structure]

[0257] wherein R¹ is H, C1-C3 alkyl, or aryl; and

[0258] F′ is a small molecule fragment moiety.

[0259] In some embodiments, F′ has a molecular weight of about 175, 200, 225, 250, 275, 300, 350, 400, 450, 500, 550, 600, 650, 700, 750, 800, 850, 900, 950, 1000 Dalton, or higher. In some embodiments, the molecular weight of F′ is prior to enrichment with a halogen, a nonmetal, or a transition metal. In some embodiments, F′ is a small molecule fragment moiety illustrated in FIG. 1 (e.g., FIG. 1A and/or FIG. 1B).

[0260] In some embodiments, disclosed herein is a vaccine comprising an antibody or its binding fragment thereof that recognizes a derivative of cereblon protein having the structure of Formula (I),

[chemical structure]

[0261] wherein,
   [0262] the derivation occurs at cereblon cysteine residue position 188 based on SEQ ID NO: 9665;
   [0263] R is selected from:

[chemical structure]

[0264] wherein R¹ is H, C1-C3 alkyl, or aryl; and
[0265] F′ is a small molecule fragment moiety.

[0266] In some embodiments, F′ has a molecular weight of about 175, 200, 225, 250, 275, 300, 350, 400, 450, 500, 550, 600, 650, 700, 750, 800, 850, 900, 950, 1000 Dalton, or higher. In some embodiments, the molecular weight of F′ is prior to enrichment with a halogen, a nonmetal, or a transition metal. In some embodiments, F′ is a small molecule fragment moiety illustrated in FIG. 1 (e.g., FIG. 1A and/or FIG. 1B).

[0267] In some embodiments, disclosed herein is a vaccine comprising an antibody or its binding fragment thereof that recognizes a derivative of cereblon protein having the structure of Formula (I),

[chemical structure]

[0268] wherein,
   [0269] the derivation occurs at cereblon cysteine residue position 287 based on SEQ ID NO: 9665;
   [0270] R is selected from:

[chemical structure]

[0271] wherein R¹ is H, C1-C3 alkyl, or aryl; and
[0272] F′ is a small molecule fragment moiety.

[0273] In some embodiments, F′ has a molecular weight of about 175, 200, 225, 250, 275, 300, 350, 400, 450, 500, 550, 600, 650, 700, 750, 800, 850, 900, 950, 1000 Dalton, or higher. In some embodiments, the molecular weight of F′ is prior to enrichment with a halogen, a nonmetal, or a transition metal. In some embodiments, F′ is a small molecule fragment moiety illustrated in FIG. 1 (e.g., FIG. 1A and/or FIG. 1B).

[0274] In some embodiments, disclosed herein is a vaccine comprising an antibody or its binding fragment thereof that recognizes a derivative of a cysteine containing protein that comprises the motif XₚC*Z, wherein Xₚ is a polar residue, C* denotes the site of modification, and Z is any amino acid. In some cases, the cysteine containing protein is selected from AIP, PES1, IKBKB, XPO1, KDM4B, NR3C1, GSTP1, TNFAIP3, ACAT1, IRAK1, GNB2L1, IRF4, USP34, ZC3HAV1, USP7, PELI1, DCUN1D1, USP28, UBE2O, RRAGC, MLTK, USP22, KDM3A, and USP16.

[0275] In some embodiments, disclosed herein is a vaccine comprising an antibody or its binding fragment thereof that recognizes a derivative of a cysteine containing protein that comprises the motif XₚC*Xₙ, wherein Xₚ is a polar residue, C* denotes the site of modification, and Xₙ is a nonpolar residue. In some cases, the cysteine containing protein is selected from AIP, PES1, IKBKB, XPO1, GSTP1, ACAT1, IRAK1, IRF4, ZC3HAV1, USP7, PELI1, USP28, UBE20, RRAGC, MLTK, USP22, KDM3A, and USP16.

[0276] In some embodiments, disclosed herein is a vaccine comprising an antibody or its binding fragment thereof that recognizes a derivative of a cysteine containing protein that comprises the motif XₚC*Xₚ, wherein Xₚ is a polar residue and C* denotes the site of modification. In some cases, the cysteine containing protein is selected from KDM4B, NR3C1, TNFAIP3, USP7, and USP22.

[0277] In some embodiments, disclosed herein is a vaccine comprising an antibody or its binding fragment thereof that recognizes a derivative of a cysteine containing protein that comprises the motif XₚC*X_{b}, wherein Xₚ is a polar residue, C* denotes the site of modification, and X_{b} is a basic residue. In some cases, the cysteine containing protein is selected from GNB2L1 and USP34.

[0278] In some embodiments, disclosed herein is a vaccine comprising an antibody or its binding fragment thereof that recognizes a derivative of a cysteine containing protein that comprises the motif XₚC*Xₐ, wherein Xₚ is a polar residue, C* denotes the site of modification, and Xₐ is an acidic residue. In some cases, the cysteine containing protein is DCUN1D1.

[0279] In some embodiments, disclosed herein is a vaccine comprising an antibody or its binding fragment thereof that recognizes a derivative of a cysteine containing protein that comprises the motif SC*Z, wherein C* denotes the site of modification, and Z is any amino acid. In some cases, the cysteine containing protein is selected from PES1, IKBKB, GSTP1, ACAT1, IRAK1, ZC3HAV1, and RRAGC.

[0280] In some embodiments, disclosed herein is a vaccine comprising an antibody or its binding fragment thereof that recognizes a derivative of a cysteine containing protein that comprises the motif NC*Z, wherein C* denotes the site of modification, and Z is any amino acid. In some cases, the cysteine containing protein is selected from XPO1, GNB2L1, USP34, UBE2O, MLTK, and USP22.

[0281] In some embodiments, disclosed herein is a vaccine comprising an antibody or its binding fragment thereof that recognizes a derivative of a cysteine containing protein that comprises the motif YC*Z, wherein C* denotes the site of modification, and Z is any amino acid. In some cases, the cysteine containing protein is selected from KDM4B and NR3C1.

[0282] In some embodiments, disclosed herein is a vaccine comprising an antibody or its binding fragment thereof that recognizes a derivative of a cysteine containing protein that comprises the motif TC*Z, wherein C* denotes the site of modification, and Z is any amino acid. In some cases, the cysteine containing protein is selected from TNFAIP3, USP7, USP28, KDM3A, and USP16.

[0283] In some embodiments, disclosed herein is a vaccine comprising an antibody or its binding fragment thereof that recognizes a derivative of a cysteine containing protein that comprises the motif QC*Z, wherein C* denotes the site of modification, and Z is any amino acid. In some cases, the cysteine containing protein is selected from IRF4, PELI1, DCUN1D1, and USP22.

[0284] In some embodiments, disclosed herein is a vaccine comprising an antibody or its binding fragment thereof that recognizes a derivative of a cysteine containing protein that comprises the motif CC*Z, wherein C* denotes the site of modification, and Z is any amino acid. In some cases, the cysteine containing protein is AIP.

[0285] In some embodiments, disclosed herein is a vaccine comprising an antibody or its binding fragment thereof that recognizes a derivative of a cysteine containing protein that comprises the motif XₚC*Z, wherein Xₚ is a polar residue, C* denotes the site of modification, and Z is any amino acid. In some cases, the cysteine containing protein is selected from IKBKB, KDM4B, GSTP1, TNFAIP3, ACAT1, IRAK1, USP34, USP7, PELI1, USP28, UBE2O, MLTK, USP22, KDM3A, and USP16.

[0286] In some embodiments, disclosed herein is a vaccine comprising an antibody or its binding fragment thereof that recognizes a derivative of a cysteine containing protein that comprises the motif XₚC*Z, wherein Xₚ is a polar residue, C* denotes the site of modification, and Z is any amino acid. In some cases, the cysteine containing protein is selected from NR3C1, IRF4, and ZC3HAV1.

[0287] In some embodiments, disclosed herein is a vaccine comprising an antibody or its binding fragment thereof that recognizes a derivative of a cysteine containing protein that comprises the motif XₚC*Z, wherein Xₚ is a polar residue, C* denotes the site of modification, and Z is any amino acid. In some cases, the cysteine containing protein is selected from GNB2L1 and RRAGC.

[0288] In some embodiments, disclosed herein is a vaccine comprising an antibody or its binding fragment thereof that recognizes a derivative of a cysteine containing protein that comprises the motif XₚC*Z, wherein Xₚ is a polar residue, C* denotes the site of modification, and Z is any amino acid. In some cases, the cysteine containing protein is selected from AIP, PES1, XPO1, and DCUN1D1.

[0289] In some embodiments, disclosed herein is a vaccine comprising an antibody or its binding fragment thereof that recognizes a derivative of a cysteine containing protein that comprises the motif XₙC*Z, wherein Xₙ is a nonpolar residue, C* denotes the site of modification, and Z is any amino acid. In some cases, the cysteine containing protein is selected from PES1, CYR61, UBE2L6, XPO1, ADA, NR3C1, POU2F2, UCHL3, MGMT, ERCC3, ACAT1, STAT3, UBA7, CASP2, IDH2, LRBA, UBE2L3, RELB, IRF8, CASP8, PDIA6, PCK2, PFKFB4, PDE12, USP34, USP48, SMARCC2, and SAMHD1.

[0290] In some embodiments, disclosed herein is a vaccine comprising an antibody or its binding fragment thereof that recognizes a derivative of a cysteine containing protein that comprises the motif XₙC*Xₙ, wherein Xₙ is a nonpolar residue and C* denotes the site of modification. In some cases, the cysteine containing protein is selected from PES1, CYR61, NR3C1, UCHL3, ERCC3, ACAT1, STAT3, CASP2, LRBA, UBE2L3, RELB, PDIA6, PCK2, PFKFB4, USP48, and SMARCC2.

[0291] In some embodiments, disclosed herein is a vaccine comprising an antibody or its binding fragment thereof that recognizes a derivative of a cysteine containing protein that comprises the motif XₙC*Xₚ, wherein Xₐ is a nonpolar residue, C* denotes the site of modification, and Xₚ is a polar residue. In some cases, the cysteine containing protein is selected from UBE2L6, POU2F2, MGMT, ACAT1, UBA7, CASP8, PDE12, and USP34.

[0292] In some embodiments, disclosed herein is a vaccine comprising an antibody or its binding fragment thereof that recognizes a derivative of a cysteine containing protein that comprises the motif XₙC*Xₐ, wherein Xₙ is a nonpolar residue, C* denotes the site of modification, and Xₐ is an acidic residue. In some cases, the cysteine containing protein is selected from CYR61 and XPO1.

[0293] In some embodiments, disclosed herein is a vaccine comprising an antibody or its binding fragment thereof that recognizes a derivative of a cysteine containing protein that comprises the motif XₙC*X_{b}, wherein Xₙ is a nonpolar residue, C* denotes the site of modification, and X_{b} is a basic residue. In some cases, the cysteine containing protein is selected from ADA, MGMT, IDH2, IRF8, and SAMHD1.

[0294] In some embodiments, disclosed herein is a vaccine comprising an antibody or its binding fragment thereof that recognizes a derivative of a cysteine containing protein that comprises the motif LC*Z, wherein C* denotes the site of modification, and Z is any amino acid. In some cases, the cysteine containing protein is selected from PES1, CYR61, XPO1, NR3C1, and SMARCC2.

[0295] In some embodiments, disclosed herein is a vaccine comprising an antibody or its binding fragment thereof that recognizes a derivative of a cysteine containing protein that comprises the motif PC*Z, wherein C* denotes the site of modification, and Z is any amino acid. In some cases, the cysteine containing protein is selected from CYR61, UBE2L6, MGMT, ERCC3, ACAT1, and USP48.

[0296] In some embodiments, disclosed herein is a vaccine comprising an antibody or its binding fragment thereof that recognizes a derivative of a cysteine containing protein that comprises the motif GC*Z, wherein C* denotes the site of modification, and Z is any amino acid. In some cases, the cysteine containing protein is selected from ADA, RELB, and USP34.

[0297] In some embodiments, disclosed herein is a vaccine comprising an antibody or its binding fragment thereof that recognizes a derivative of a cysteine containing protein that comprises the motif AC*Z, wherein C* denotes the site of modification, and Z is any amino acid. In some cases, the cysteine containing protein is selected from UCHL3, CASP2, IDH2, LRBA, CASP8, PCK2, and PDE12.

[0298] In some embodiments, disclosed herein is a vaccine comprising an antibody or its binding fragment thereof that recognizes a derivative of a cysteine containing protein that comprises the motif VC*Z, wherein C* denotes the site of modification, and Z is any amino acid. In some cases, the cysteine containing protein is selected from MGMT, ACAT1, UBA7, UBE2L3, and IRF8.

[0299] In some embodiments, disclosed herein is a vaccine comprising an antibody or its binding fragment thereof that recognizes a derivative of a cysteine containing protein that comprises the motif XᵣC*Z, wherein X, denotes an aromatic residue, C* denotes the site of modification, and Z is any amino acid. In some cases, the cysteine containing protein is selected from POU2F2, PDIA6, and SAMHD1.

[0300] In some embodiments, disclosed herein is a vaccine comprising an antibody or its binding fragment thereof that recognizes a derivative of a cysteine containing protein that comprises the motif XₐC*Z, wherein Xₙ is a nonpolar residue, C* denotes the site of modification, and Z is any amino acid. In some cases, the cysteine containing protein is selected from UBE2L6, ADA, UCHL3, MGMT, ERCC3, ACAT1, UBA7, CASP2, IDH2, UBE2L3, CASP8, PDIA6, PCK2, PFKFB4, PDE12, USP34, USP48, and SAMHD1.

[0301] In some embodiments, disclosed herein is a vaccine comprising an antibody or its binding fragment thereof that recognizes a derivative of a cysteine containing protein that comprises the motif XₙC*Z, wherein Xₙ is a nonpolar residue, C* denotes the site of modification, and Z is any amino acid. In some cases, the cysteine containing protein is selected from NR3C1, POU2F2, STAT3, RELB, IRF8, and SMARCC2.

[0302] In some embodiments, disclosed herein is a vaccine comprising an antibody or its binding fragment thereof that recognizes a derivative of a cysteine containing protein that comprises the motif XₙC*Z, wherein X, is a nonpolar residue, C* denotes the site of modification, and Z is any amino acid. In some cases, the cysteine containing protein is selected from PES1, CYR61, XPO1, and LRBA.

[0303] In some embodiments, disclosed herein is a vaccine comprising an antibody or its binding fragment thereof that recognizes a derivative of a cysteine containing protein that comprises the motif XₐC*Z, wherein Xₐ is an acidic residue, C* denotes the site of modification, and Z is any amino acid. In some cases, the cysteine containing protein is selected from ZAP70, PRKCQ, and PRMT1.

[0304] In some embodiments, disclosed herein is a vaccine comprising an antibody or its binding fragment thereof that recognizes a derivative of a cysteine containing protein that comprises the motif EC*Z, wherein C* denotes the site of modification, and Z is any amino acid. In some cases, the cysteine containing protein is selected from ZAP70 and PRKCQ.

[0305] In some embodiments, disclosed herein is a vaccine comprising an antibody or its binding fragment thereof that recognizes a derivative of a cysteine containing protein that comprises the motif X_{b}C*Z, wherein X_{b} is a basic residue, C* denotes the site of modification, and Z is any amino acid. In some cases, the cysteine containing protein is selected from CYR61, ZNF217, NCF1, IREB2, LRBA, CDK5, EP300, EZH2, UBE2S, VCPIP1, RRAGC, and IRAK4.

[0306] In some embodiments, disclosed herein is a vaccine comprising an antibody or its binding fragment thereof that recognizes a derivative of a cysteine containing protein that comprises the motif X_{b}C*Xₙ, wherein X_{b} is a basic residue, C* denotes the site of modification, and Xₙ is a nonpolar residue. In some cases, the cysteine containing protein is selected from CYR61, ZNF217, IREB2, EP300, UBE2S, VCPIP1, RRAGC, and IRAK4.

[0307] In some embodiments, disclosed herein is a vaccine comprising an antibody or its binding fragment thereof that recognizes a derivative of a cysteine containing protein that comprises the motif X_{b}C*Xₚ, wherein X_{b} is a basic residue, C* denotes the site of modification, and Xₚ is a polar residue. In some cases, the cysteine containing protein is selected from NCF1, LRBA, and CDK5.

[0308] In some embodiments, disclosed herein is a vaccine comprising an antibody or its binding fragment thereof that recognizes a derivative of a cysteine containing protein that comprises the motif X_{b}C*X_{b}, wherein X_{b} is a basic residue and C* denotes the site of modification. In some cases, the cysteine containing protein is EZH2.

[0309] In some embodiments, disclosed herein is a vaccine comprising an antibody or its binding fragment thereof that recognizes a derivative of a cysteine containing protein that comprises the motif RC*Z, wherein C* denotes the site of modification, and Z is any amino acid. In some cases, the cysteine containing protein is selected from ZNF217, NCF1, CDK5, EP300, and IRAK4.

[0310] In some embodiments, disclosed herein is a vaccine comprising an antibody or its binding fragment thereof that recognizes a derivative of a cysteine containing protein that comprises the motif KC*Z, wherein C* denotes the site of modification, and Z is any amino acid. In some cases, the cysteine containing protein is selected from CYR61, IREB2, LRBA, and UBE2S.

[0311] In some embodiments, disclosed herein is a vaccine comprising an antibody or its binding fragment thereof that recognizes a derivative of a cysteine containing protein that comprises the motif HC*Z, wherein C* denotes the site of modification, and Z is any amino acid. In some cases, the cysteine containing protein is selected from EZH2, VCPIP1, and RRAGC.

[0312] In some embodiments, disclosed herein is a vaccine comprising an antibody or its binding fragment thereof that recognizes a derivative of a cysteine containing protein that comprises the motif X_{b}C*Z, wherein X_{b} is a basic residue, C* denotes the site of modification, and Z is any amino acid. In some cases, the cysteine containing protein is selected from CDK5, EP300, EZH2, UBE2S, VCPIP1, and IRAK4.

[0313] In some embodiments, disclosed herein is a vaccine comprising an antibody or its binding fragment thereof that recognizes a derivative of a cysteine containing protein that comprises the motif X_{b}C*Z, wherein X_{b} is a basic residue, C* denotes the site of modification, and Z is any amino acid. In some cases, the cysteine containing protein is selected from ZNF217 and IREB2.

[0314] In some embodiments, disclosed herein is a vaccine comprising an antibody or its binding fragment thereof that recognizes a derivative of a cysteine containing protein that comprises the motif X_{b}C*Z, wherein X_{b} is a basic residue, C* denotes the site of modification, and Z is any amino acid. In some cases, the adapter, scaffolding protein or the modulator protein is selected from NCF1.

[0315] In some embodiments, disclosed herein is a vaccine comprising an antibody or its binding fragment thereof that recognizes a derivative of a cysteine containing protein that comprises the motif X_{b}C*Z, wherein X_{b} is a basic residue, C* denotes the site of modification, and Z is any amino acid. In some cases, the cysteine containing protein is selected from RRAGC.

[0316] In some embodiments, disclosed herein is a vaccine comprising an antibody or its binding fragment thereof that recognizes a derivative of a cysteine containing protein that comprises the motif X_{b}C*Z, wherein X_{b} is a basic residue, C* denotes the site of modification, and Z is any amino acid. In some cases, the cysteine containing protein is selected from CYR61 and LRBA.

[0317] In some cases, a vaccine described herein is further formulated with an adjuvant and/or additional carriers or excipients;

### Adjuvant

[0318] In some embodiments, the pharmaceutical composition and/or the vaccine further comprises an adjuvant. In some instances, an adjuvant enhances the immune response (humoral and/or cellular) elicited in a subject receiving the pharmaceutical composition and/or the vaccine. In some instances, an adjuvant elicits a Th1-type response. In other instances, an adjuvant elicits a Th2-type response. In some instances, a Th1-type response is characterized by the production of cytokines such as IFN-γ as opposed to a Th2-type response which is characterized by the production of cytokines such as IL-4, IL-5, and IL-10.

[0319] In some embodiments, an adjuvant comprises a stimulatory molecule such as a cytokine. Non-limiting examples of cytokines include: CCL20, a-interferon (IFN-a), β-interferon (IFN-β), γ-interferon, platelet derived growth factor (PDGF), TNFa, TNFp, GM-CSF, epidermal growth factor (EGF), cutaneous T cell-attracting chemokine (CTACK), epithelial thymus-expressed chemokine (TECK), mucosae-associated epithelial chemokine (MEC), IL-12, IL-15, IL-28, MHC, CD80, CD86, IL-1, IL-2, IL-4, IL-5, IL-6, IL-10, IL-18, MCP-1, MIP-1a, MIP-1-, IL-8, L-selectin, P-selectin, E-selectin, CD34, GlyCAM-1, MadCAM-1, LFA-1, VLA-1, Mac-1, p150.95, PECAM, ICAM-1, ICAM-2, ICAM-3, CD2, LFA-3, M-CSF, G-CSF, mutant forms of IL-18, CD40, CD40L, vascular growth factor, fibroblast growth factor, IL-7, nerve growth factor, vascular endothelial growth factor, Fas, TNF receptor, Fit, Apo-1, p55, WSL-1, DR3, TRAMP, Apo-3, AIR, LARD, NGRF, DR4, DRS, KILLER, TRAIL-R2, TRICK2, DR6, Caspase ICE, Fos, c-jun, Sp-1, Ap-1, Ap-2, p38, p65Rel, MyD88, IRAK, TRAF6, IkB, Inactive NIK, SAP K, SAP-I, JNK, interferon response genes, NFkB, Bax, TRAIL, TRAILrec, TRAILrecDRC5, TRAIL-R3, TRAIL-R4, RANK, RANK LIGAND, Ox40, Ox40 LIGAND, NKG2D, MICA, MICB, NKG2A, NKG2B, NKG2C, NKG2E, NKG2F, TAPI, and TAP2.

[0320] Additional adjuvants include, for example: MCP-1, MIP-1a, MIP-1p, IL-8, RANTES, L-selectin, P-selectin, E-selectin, CD34, GlyCAM-1, MadCAM-1, LFA-1, VLA-1, Mac-1, p150.95, PECAM, ICAM-1, ICAM-2, ICAM-3, CD2, LFA-3, M-CSF, G-CSF, IL-4, mutant forms of IL-18, CD40, CD40L, vascular growth factor, fibroblast growth factor, IL-7, IL-22, nerve growth factor, vascular endothelial growth factor, Fas, TNF receptor, Fit, Apo-1, p55, WSL-1, DR3, TRAMP, Apo-3, AIR, LARD, NGRF, DR4, DR5, KILLER, TRAIL-R2, TRICK2, DR6, Caspase ICE, Fos, c-jun, Sp-1, Ap-1, Ap-2, p38, p65Rel, MyD88, IRAK, TRAF6, IkB, Inactive NIK, SAP K, SAP-1, JNK, interferon response genes, NFkB, Bax, TRAIL, TRAILrec, TRAILrecDRC5, TRAIL-R3, TRAIL-R4, RANK, RANK LIGAND, Ox40, Ox40 LIGAND, NKG2D, MICA, MICB, NKG2A, NKG2B, NKG2C, NKG2E, NKG2F, TAP1, TAP2 and functional fragments thereof.

[0321] In some embodiments, an adjuvant is a modulator of a toll like receptor. Examples of modulators of toll-like receptors include TLR-9 agonists and are not limited to small molecule modulators of toll-like receptors such as Imiquimod. Other examples of adjuvants that are used in combination with a vaccine described herein include and are not limited to saponin, CpG ODN, and the like.

[0322] Sometimes, an adjuvant is selected from bacteria toxoids, polyoxypropylene-polyoxyethylene block polymers, aluminum salts, liposomes, CpG polymers, oil-in-water emulsions, or a combination thereof.

[0323] In some embodiments, an adjuvant is a lipid-based adjuvant, such as MPLA and MDP. In some instances, monophosphoryl lipid A (MPLA) is an adjuvant that causes increased presentation of liposomal antigen to specific T Lymphocytes. In some cases, a muramyl dipeptide (MDP) is used as a suitable adjuvant in conjunction with the vaccine formulations described herein.

[0324] In some embodiments, an adjuvant is an oil-in-water emulsion. The oil-in-water emulsion suitable for use with a vaccine described herein include, for example, at least one oil and at least one surfactant, with the oil(s) and surfactant(s) being biodegradable (metabolisable) and biocompatible. In some instances, the oil droplets in the emulsion is less than 5 μm in diameter, or have a sub-micron diameter, with these small sizes being achieved with a high pressure homogenizer to provide stable emulsions. Droplets with a size less than 220 nm are optionally subjected to filter sterilization.

[0325] In some instances, oils used include such as those from an animal (such as fish) or vegetable source. Sources for vegetable oils include, for example, nuts, seeds and grains. Peanut oil, soybean oil, coconut oil, and olive oil, exemplify the nut oils. Jojoba oil is used e.g. obtained from the jojoba bean. Seed oils include safflower oil, cottonseed oil, sunflower seed oil, sesame seed oil, etc. The grain group include: corn oil and oils of other cereal grains such as wheat, oats, rye, rice, teff, triticale, and the like. 6-10 carbon fatty acid esters of glycerol and 1,2-propanediol, while not occurring naturally in seed oils, can be prepared by hydrolysis, separation and esterification of the appropriate materials starting from the nut and seed oils. Fats and oils from mammalian milk are optionally metabolizable and are therefore used in with the vaccines described herein. The procedures for separation, purification, saponification and other means necessary for obtaining pure oils from animal sources are well known in the art. Fish contain metabolizable oils which are readily recovered. For example, cod liver oil, shark liver oils, and whale oil such as spermaceti can exemplify several of the fish oils which can be used herein. A number of branched chain oils can be synthesized biochemically in 5-carbon isoprene units and can be generally referred to as terpenoids. Shark liver oil contains a branched, unsaturated terpenoid known as squalene, 2,6,10,15,19,23-hexamethyl-2,6,10,14,18,22-tetracosahexaene. Squalane, the saturated analog to squalene, can also be used. Fish oils, including squalene and squalane, can be readily available from commercial sources or can be obtained by methods known in the art.

[0326] Other useful oils include tocopherols, for use in elderly patients (e.g. aged 60 years or older) due to vitamin E been reported to have a positive effect on the immune response in this patient group. Further, tocopherols have antioxidant properties that, for example, help to stabilize the emulsions. Various tocopherols exist (α, β, γ, δ, ε or ξ) but α is usually used. An example of α-tocopherol is DL-α-tocopherol. α-tocopherol succinate can be compatible with HIV vaccines and can be a useful preservative as an alternative to mercurial compounds.

[0327] Mixtures of oils are used e.g. squalene and α-tocopherol. In some instances, an oil content in the range of 2-20% (by volume) is used.

[0328] In some instances, surfactants are classified by their ‘HLB’ (hydrophile/lipophile balance). In some cases, surfactants have a HLB of at least 10, at least 15, and/or at least 16. Surfactants can include, but are not limited to: the polyoxyethylene sorbitan esters surfactants (commonly referred to as the Tweens), especially polysorbate 20 and polysorbate 80; copolymers of ethylene oxide (EO), propylene oxide (PO), and/or butylene oxide (BO), sold under the DOWFAX™ tradename, such as linear EO/PO block copolymers; octoxynols, which can vary in the number of repeating ethoxy (oxy-1,2-ethanediyl) groups, such as octoxynol-9 (Triton X-100, or t-octylphenoxypolyethoxyethanol); (octylphenoxy)polyethoxyethanol (IGEPAL CA-630/NP-40); phospholipids such as phosphatidylcholine (lecithin); nonylphenol ethoxylates, such as the Tergitol™ NP series; polyoxyethylene fatty ethers derived from lauryl, cetyl, stearyl, and oleyl alcohols (known as Brij surfactants), such as triethyleneglycol monolauryl ether (Brij 30); and sorbitan esters (commonly known as the SPANs), such as sorbitan trioleate (Span 85) and sorbitan monolaurate. Non-ionic surfactants can be used herein.

[0329] Mixtures of surfactants are used e.g. Tween 80/Span 85 mixtures. A combination of a polyoxyethylene sorbitan ester and an octoxynol are also suitable. Another combination comprises, for example, laureth 9 plus a polyoxyethylene sorbitan ester and/or an octoxynol.

[0330] The amounts of surfactants (% by weight) include, for example, polyoxyethylene sorbitan esters (such as Tween 80) 0.01 to 1%, in particular about 0.1%; octyl- or nonylphenoxy polyoxyethanols (such as Triton X-100, or other detergents in the Triton series) 0.001 to 0.1%, such as 0.005 to 0.02%; polyoxyethylene ethers (such as laureth 9) 0.1 to 20%, such as 0.1 to 10% and in particular 0.1 to 1% or about 0.5%.

### Carriers and Excipients

[0331] In some instances, a vaccine further includes carriers and excipients (including, but not limited to, buffers, carbohydrates, mannitol, proteins, polypeptides or amino acids such as glycine, antioxidants, bacteriostats, chelating agents, suspending agents, thickening agents, and/or preservatives), water, oils (including those of petroleum, animal, vegetable or synthetic origin, such as peanut oil, soybean oil, mineral oil, sesame oil, and the like), saline solutions, aqueous dextrose and glycerol solutions, flavoring agents, coloring agents, detackifiers, and other acceptable additives, adjuvants, binders, or other pharmaceutically acceptable auxiliary substances as required to approximate physiological conditions (such as pH buffering agents, tonicity adjusting agents, emulsifying agents, wetting agents, and the like). Examples of excipients include starch, glucose, lactose, sucrose, gelatin, malt, rice, flour, chalk, silica gel, sodium stearate, glycerol monostearate, talc, sodium chloride, dried skim milk, glycerol, propylene, glycol, water, ethanol, and the like. In another instances, the pharmaceutical preparation is substantially free of preservatives. In other instances, the pharmaceutical preparation can contain at least one preservative. General methodology on pharmaceutical dosage forms is found in Ansel et al., Pharmaceutical Dosage Forms and Drug Delivery Systems (Lippencott Williams & Wilkins, Baltimore Md. (1999)). It will be recognized that, while any suitable carrier known to those of ordinary skill in the art can be employed to administer the pharmaceutical compositions described herein, the type of carrier will vary depending on the mode of administration.

[0332] In some instances, a pharmaceutical composition of the vaccine is encapsulated within liposomes using well-known technology. Biodegradable microspheres can also be employed as carriers for the pharmaceutical compositions described herein. Suitable biodegradable microspheres are disclosed, for example, in U.S. Pat. Nos. 4,897,268; 5,075,109; 5,928,647; 5,811,128; 5,820,883; 5,853,763; 5,814,344 and 5,942,252.

[0333] In some cases, a pharmaceutical composition is administered in liposomes or microspheres (or microparticles). Methods for preparing liposomes and microspheres for administration to a patient are well known to those of skill in the art. U.S. Pat. No. 4,789,734, the contents of which are hereby incorporated by reference, describes methods for encapsulating biological materials in liposomes. Essentially, the material is dissolved in an aqueous solution, the appropriate phospholipids and lipids added, along with surfactants if required, and the material dialyzed or sonicated, as necessary. A review of known methods is provided by G. Gregoriadis, Chapter 14, “Liposomes,” Drug Carriers in Biology and Medicine, pp. 2.sup.87-341 (Academic Press, 1979).

[0334] Microspheres formed of polymers or proteins are well known to those skilled in the art, and can be tailored for passage through the gastrointestinal tract directly into the blood stream. Alternatively, the compound can be incorporated and the microspheres, or composite of microspheres, implanted for slow release over a period of time ranging from days to months. See, for example, U.S. Pat. Nos. 4,906,474, 4,925,673 and 3,625,214, and Jein, TIPS 19:155-157 (1998), the contents of which are hereby incorporated by reference.

[0335] In some cases, a vaccine includes preservatives such as thiomersal or 2-phenoxyethanol. In some instances, the vaccine is substantially free from (e.g. <10 μg/ml) mercurial material e.g. thiomersal-free. In some instances, α-Tocopherol succinate is used as an alternative to mercurial compounds.

[0336] For controlling the tonicity, a physiological salt such as sodium salt are optionally included in the vaccine. Other salts include potassium chloride, potassium dihydrogen phosphate, disodium phosphate, and/or magnesium chloride, or the like.

[0337] In some instances, a vaccine has an osmolality of between 200 mOsm/kg and 400 mOsm/kg, between 240-360 mOsm/kg, or within the range of 290-310 mOsm/kg.

[0338] In some cases, a vaccine comprises one or more buffers, such as a Tris buffer; a borate buffer; a succinate buffer; a histidine buffer (particularly with an aluminum hydroxide adjuvant); or a citrate buffer. Buffers, in some cases, are included in the 5-20 mM range.

[0339] In some cases, the pH of the vaccine is between about 5.0 and about 8.5, between about 6.0 and about 8.0, between about 6.5 and about 7.5, or between about 7.0 and about 7.8.

[0340] In some instances, a vaccine is sterile. In some cases, the vaccine is non-pyrogenic e.g. containing <1 EU (endotoxin unit, a standard measure) per dose, and can be <0.1 EU per dose.

[0341] In some instances, a vaccine includes detergent e.g. a polyoxyethylene sorbitan ester surfactant (known as ‘Tweens’), an octoxynol (such as octoxynol-9 (Triton X-100) or t-octylphenoxypolyethoxyethanol), a cetyl trimethyl ammonium bromide (‘CTAB’), or sodium deoxycholate, particularly for a split or surface antigen vaccine. The detergent can be present only at trace amounts. Thus the vaccine can include less than 1 mg/ml of each of octoxynol-10 and polysorbate 80. Other residual components in trace amounts can be antibiotics (e.g. neomycin, kanamycin, polymyxin B).

[0342] In some instances, a vaccine is formulated as a sterile solution or suspension, in suitable vehicles, well known in the art. The pharmaceutical compositions can be sterilized by conventional, well-known sterilization techniques, or can be sterile filtered. The resulting aqueous solutions can be packaged for use as is, or lyophilized, the lyophilized preparation being combined with a sterile solution prior to administration. Suitable formulations and additional carriers are described in Remington “The Science and Practice of Pharmacy” (20^{th} Ed., Lippincott Williams & Wilkins, Baltimore Md.), the teachings of which are incorporated by reference in their entirety herein.

[0343] In some instances, a vaccine is formulated with one or more pharmaceutically acceptable salts. Pharmaceutically acceptable salts can include those of the inorganic ions, such as, for example, sodium, potassium, calcium, magnesium ions, and the like. Such salts can include salts with inorganic or organic acids, such as hydrochloric acid, hydrobromic acid, phosphoric acid, nitric acid, sulfuric acid, methanesulfonic acid, p-toluenesulfonic acid, acetic acid, fumaric acid, succinic acid, lactic acid, mandelic acid, malic acid, citric acid, tartaric acid, or maleic acid. In addition, if the agent(s) contain a carboxy group or other acidic group, it can be converted into a pharmaceutically acceptable addition salt with inorganic or organic bases. Examples of suitable bases include sodium hydroxide, potassium hydroxide, ammonia, cyclohexylamine, dicyclohexyl-amine, ethanolamine, diethanolamine, triethanolamine, and the like.

[0344] Pharmaceutical compositions comprising an active agent such as small molecule fragment and/or a cysteine-containing polypeptide-small molecule fragment adduct described herein, in combination with one or more adjuvants, can be formulated to comprise certain molar ratios. For example, molar ratios of about 99:1 to about 1:99 of an active agent such as a peptide, a nucleic acid, an antibody or fragments thereof, and/or an APC described herein, in combination with one or more adjuvants, can be used. In some instances, the range of molar ratios of an active agent such as a peptide, a nucleic acid, an antibody or fragments thereof, and/or an APC described herein, in combination with one or more adjuvants, can be selected from about 80:20 to about 20:80; about 75:25 to about 25:75, about 70:30 to about 30:70, about 66:33 to about 33:66, about 60:40 to about 40:60; about 50:50; and about 90:10 to about 10:90. The molar ratio of an active agent such as a peptide, a nucleic acid, an antibody or fragments thereof, and/or an APC described herein, in combination with one or more adjuvants, can be about 1:9, and in some cases can be about 1:1. The active agent such as a peptide, a nucleic acid, an antibody or fragments thereof, and/or an APC described herein, in combination with one or more adjuvants, can be formulated together, in the same dosage unit e.g., in one vial, suppository, tablet, capsule, an aerosol spray; or each agent, form, and/or compound can be formulated in separate units, e.g., two vials, suppositories, tablets, two capsules, a tablet and a vial, an aerosol spray, and the like.

### Methods of Generating an Antibody

[0345] In some embodiments, a method of generating or raising an antibody or its binding fragment thereof comprises inoculating a mammal (e.g., a mouse, rat, or rabbit) with a small molecule fragment composition described herein. In some instances, the small molecule fragment is a small molecule fragment of Formula (I). In some instances, the method further comprises harvesting and purifying an antibody against the small molecule fragment composition.

[0346] In some embodiments, a method of generating or raising an antibody or its binding fragment thereof comprises inoculating a mammal (e.g., a mouse, rat, or rabbit) with a cysteine-containing polypeptide-small molecule fragment adduct described herein. In some instances, the cysteine-containing polypeptide-small molecule fragment adduct is a purified cysteine-containing polypeptide-small molecule fragment adduct. In some instances, the cysteine-containing polypeptide is a polypeptide illustrated in Tables 1-5. In some instances, the cysteine-containing polypeptide an isolated and purified polypeptide comprising at least 70%, 80%, 85%, 90%, 95%, 96%, 97%, 98%, 99%, or more sequence identity to at least seven contiguous amino acids of an amino acid sequence selected from SEQ ID NOs: 1-9655. In some instances, the method further comprises harvesting and purifying an antibody against the cysteine-containing polypeptide-small molecule fragment adduct.

[0347] In some instances, a method of generating or raising an antibody or its binding fragment thereof comprises inoculating a mammal (e.g., a mouse, rat, or rabbit) with a cultured cell expressing a cysteine-containing polypeptide and further administrating a small molecule fragment described herein to generate a cysteine-containing polypeptide-small molecule fragment adduct. In some instances, the cysteine-containing polypeptide is a polypeptide illustrated in Tables 1-5. In some instances, the cysteine-containing polypeptide is an isolated and purified polypeptide comprising at least 70%, 80%, 85%, 90%, 95%, 96%, 97%, 98%, 99%, or more sequence identity to at least seven contiguous amino acids of an amino acid sequence selected from SEQ ID NOs: 1-9655. In some instances, the method further comprises harvesting and purifying an antibody against the cultured cell expressing a cysteine-containing polypeptide and further incubated with a small molecule fragment described herein.

[0348] In some instances, a method of generating or raising an antibody or its binding fragment thereof comprises inoculating a mammal (e.g., a mouse, rat, or rabbit) with dendritic-cell derived exosomes. In some instances, a dendritic-cell derived exosome comprises an antigen (e.g., a cysteine-containing polypeptide-small molecule fragment adduct) which then includes activation of the antigen-specific B-cell antibody response. In some cases, the dendritic-cell derived exosome comprises a cysteine-containing polypeptide-small molecule fragment antigen. In some cases, a method of generating or raising an antibody or its binding fragment thereof comprises inoculating a mammal (e.g., a mouse, rat, or rabbit) with dendritic-cell derived exosomes comprising a cysteine-containing polypeptide-small molecule fragment antigen. In some instances, the method further comprises harvesting and purifying an antibody against the dendritic-cell derived exosomes.

### Vaccine Formulations

[0349] In some embodiments, a vaccine described herein, in combination with one or more adjuvants, is formulated in conventional manner using one or more physiologically acceptable carriers, comprising excipients, diluents, and/or auxiliaries, e.g., which facilitate processing of the active agents into preparations that can be administered. Proper formulation depends at least in part upon the route of administration chosen. The agent(s) described herein can be delivered to a patient using a number of routes or modes of administration, including oral, buccal, topical, rectal, transdermal, transmucosal, subcutaneous, intravenous, and intramuscular applications, as well as by inhalation.

[0350] In some instances, the active agents are formulated for parenteral administration (e.g., by injection, for example bolus injection or continuous infusion) and can be presented in unit dose form in ampoules, pre-filled syringes, small volume infusion or in multi-dose containers with an added preservative. The compositions can take such forms as suspensions, solutions, or emulsions in oily or aqueous vehicles, for example solutions in aqueous polyethylene glycol.

[0351] For injectable formulations, the vehicle can be chosen from those known in art to be suitable, including aqueous solutions or oil suspensions, or emulsions, with sesame oil, corn oil, cottonseed oil, or peanut oil, as well as elixirs, mannitol, dextrose, or a sterile aqueous solution, and similar pharmaceutical vehicles. The formulation can also comprise polymer compositions which are biocompatible and biodegradable, such as poly(lactic-co-glycolic)acid. These materials can be made into micro or nanospheres, loaded with drug and further coated or derivatized to provide superior sustained-release performance. Vehicles suitable for periocular or intraocular injection include, for example, suspensions of therapeutic agent in injection grade water, liposomes, and vehicles suitable for lipophilic substances. Other vehicles for periocular or intraocular injection are well known in the art.

[0352] When administration is by injection, the active agent is sometimes formulated in aqueous solutions, specifically in physiologically compatible buffers such as Hanks' solution, Ringer's solution, or physiological saline buffer. The solution can contain formulatory agents such as suspending, stabilizing and/or dispersing agents. Alternatively, the active compound can be in powder form for constitution with a suitable vehicle, e.g., sterile pyrogen-free water, before use. In another embodiment, the pharmaceutical composition does not comprise an adjuvant or any other substance added to enhance the immune response stimulated by the peptide. In another embodiment, the pharmaceutical composition comprises a substance that inhibits an immune response to the peptide. Methods of formulation are known in the art, for example, as disclosed in Remington's Pharmaceutical Sciences, latest edition, Mack Publishing Co., Easton P.

[0353] For oral administration, the active agent is sometimes formulated readily by combining the active agent with pharmaceutically acceptable carriers well known in the art. Such carriers enable the agents of the disclosure to be formulated as tablets, including chewable tablets, pills, dragees, capsules, lozenges, hard candy, liquids, gels, syrups, slurries, powders, suspensions, elixirs, wafers, and the like, for oral ingestion by a patient to be treated. Such formulations can comprise pharmaceutically acceptable carriers including solid diluents or fillers, sterile aqueous media and various non-toxic organic solvents. A solid carrier can be one or more substances which can also act as diluents, flavoring agents, solubilizers, lubricants, suspending agents, binders, preservatives, tablet disintegrating agents, or an encapsulating material. In powders, the carrier generally is a finely divided solid which is a mixture with the finely divided active component. In tablets, the active component generally is mixed with the carrier having the necessary binding capacity in suitable proportions and compacted in the shape and size desired. The powders and tablets preferably contain from about one (1) to about seventy (70) percent of the active compound. Suitable carriers include but are not limited to magnesium carbonate, magnesium stearate, talc, sugar, lactose, pectin, dextrin, starch, gelatin, tragacanth, methylcellulose, sodium carboxymethylcellulose, a low melting wax, cocoa butter, and the like. Generally, the active agents can be included at concentration levels ranging from about 0.5%, about 5%, about 10%, about 20%, or about 30% to about 50%, about 60%, about 70%, about 80% or about 90% by weight of the total composition of oral dosage forms, in an amount sufficient to provide a desired unit of dosage.

[0354] In some instances, the vaccine is formulated into aerosol solutions, suspensions, or dry powders. The aerosol can be administered through the respiratory system or nasal passages. For example, one skilled in the art will recognize that a composition of the present disclosure can be suspended or dissolved in an appropriate carrier, e.g., a pharmaceutically acceptable propellant, and administered directly into the lungs using a nasal spray or inhalant. For example, an aerosol formulation comprising a transporter, carrier, or ion channel inhibitor can be dissolved, suspended or emulsified in a propellant or a mixture of solvent and propellant, e.g., for administration as a nasal spray or inhalant. Aerosol formulations can contain any acceptable propellant under pressure, such as a cosmetically or dermatologically or pharmaceutically acceptable propellant, as conventionally used in the art.

[0355] An aerosol formulation for nasal administration is generally an aqueous solution designed to be administered to the nasal passages in drops or sprays. Nasal solutions can be similar to nasal secretions in that they are generally isotonic and slightly buffered to maintain a pH of about 5.5 to about 6.5, although pH values outside of this range can additionally be used. Antimicrobial agents or preservatives can also be included in the formulation.

[0356] In some instances, an aerosol formulation for inhalations and inhalants are designed so that the agent or combination of agents is carried into the respiratory tree of the subject when administered by the nasal or oral respiratory route. Inhalation solutions can be administered, for example, by a nebulizer. Inhalations or insufflations, comprising finely powdered or liquid drugs, can be delivered to the respiratory system as a pharmaceutical aerosol of a solution or suspension of the agent or combination of agents in a propellant, e.g., to aid in disbursement. Propellants can be liquefied gases, including halocarbons, for example, fluorocarbons such as fluorinated chlorinated hydrocarbons, hydrochlorofluorocarbons, and hydrochlorocarbons, as well as hydrocarbons and hydrocarbon ethers.

[0357] Halocarbon propellants can include fluorocarbon propellants in which all hydrogens are replaced with fluorine, chlorofluorocarbon propellants in which all hydrogens are replaced with chlorine and at least one fluorine, hydrogen-containing fluorocarbon propellants, and hydrogen-containing chlorofluorocarbon propellants. Halocarbon propellants are described in Johnson, U.S. Pat. No. 5,376,359, issued Dec. 27, 1994; Byron et al., U.S. Pat. No. 5,190,029, issued Mar. 2, 1993; and Purewal et al., U.S. Pat. No. 5,776,434, issued Jul. 7, 1998. Hydrocarbon propellants useful in the disclosure include, for example, propane, isobutane, n-butane, pentane, isopentane, and neopentane. A blend of hydrocarbons can also be used as a propellant. Ether propellants include, for example, dimethyl ether as well as the ethers. An aerosol formulation in some instances also comprises more than one propellant. For example, the aerosol formulation can comprise more than one propellant from the same class, such as two or more fluorocarbons; or more than one, more than two, more than three propellants from different classes, such as a fluorohydrocarbon and a hydrocarbon. In some instances, vaccines are also dispensed with a compressed gas, e.g., an inert gas such as carbon dioxide, nitrous oxide or nitrogen.

[0358] Aerosol formulations can also include other components, for example, ethanol, isopropanol, propylene glycol, as well as surfactants or other components such as oils and detergents. These components can serve to stabilize the formulation and/or lubricate valve components.

[0359] In some instances, the aerosol formulation is packaged under pressure and is formulated as an aerosol using solutions, suspensions, emulsions, powders and semisolid preparations. For example, a solution aerosol formulation can comprise a solution of an agent of the disclosure such as a transporter, carrier, or ion channel inhibitor in (substantially) pure propellant or as a mixture of propellant and solvent. The solvent can be used to dissolve the agent and/or retard the evaporation of the propellant. Solvents can include, for example, water, ethanol, and glycols. Any combination of suitable solvents can be used, optionally combined with preservatives, antioxidants, and/or other aerosol components.

[0360] In some instances, an aerosol formulation is a dispersion or suspension. A suspension aerosol formulation can comprise a suspension of an agent or combination of agents of the instant disclosure, e.g., a transporter, carrier, or ion channel inhibitor, and a dispersing agent. Dispersing agents can include, for example, sorbitan trioleate, oleyl alcohol, oleic acid, lecithin, and corn oil. A suspension aerosol formulation can also include lubricants, preservatives, antioxidant, and/or other aerosol components.

[0361] In some cases, an aerosol formulation is formulated as an emulsion. An emulsion aerosol formulation can include, for example, an alcohol such as ethanol, a surfactant, water, and a propellant, as well as an agent or combination of agents of the disclosure, e.g., a transporter, carrier, or ion channel. The surfactant used can be nonionic, anionic or cationic. One example of an emulsion aerosol formulation comprises, for example, ethanol, surfactant, water, and propellant. Another example of an emulsion aerosol formulation comprises, for example, vegetable oil, glyceryl monostearate and propane.

### Vaccine Dosages, Routes of Administration and Therapeutic Regimens

[0362] In some instances, a vaccine is delivered via a variety of routes. Exemplary delivery routes include oral (including buccal and sub-lingual), rectal, nasal, topical, transdermal patch, pulmonary, vaginal, suppository, or parenteral (including intramuscular, intraarterial, intrathecal, intradermal, intraperitoneal, subcutaneous, and intravenous) administration or in a form suitable for administration by aerosolization, inhalation or insufflation. General information on drug delivery systems can be found in Ansel et al., Pharmaceutical Dosage Forms and Drug Delivery Systems (Lippencott Williams & Wilkins, Baltimore Md. (1999). The vaccine described herein can be administered to muscle, or can be administered via intradermal or subcutaneous injections, or transdermally, such as by iontophoresis. Epidermal administration of the vaccine can be employed.

[0363] In some instances, the vaccine is formulated for administration via the nasal passages. Formulations suitable for nasal administration, wherein the carrier is a solid, can include a coarse powder having a particle size, for example, in the range of about 10 to about 500 microns, which is administered in the manner in which snuff is taken, i.e., by rapid inhalation through the nasal passage from a container of the powder held close up to the nose. The formulation can be a nasal spray, nasal drops, or by aerosol administration by nebulizer. The formulation can include aqueous or oily solutions of the vaccine.

[0364] In some cases, the vaccine is a liquid preparation such as a suspension, syrup or elixir. The vaccine can also be a preparation for parenteral, subcutaneous, intradermal, intramuscular, or intravenous administration (e.g., injectable administration), such as a sterile suspension or emulsion.

[0365] In some instances, the vaccine includes material for a single immunization, or may include material for multiple immunizations (i.e. a ‘multidose’ kit). The inclusion of a preservative is preferred in multidose arrangements. As an alternative (or in addition) to including a preservative in multidose compositions, the compositions can be contained in a container having an aseptic adaptor for removal of material.

[0366] In some instances, the vaccine is administered in a dosage volume of about 0.5 mL, although a half dose (i.e. about 0.25 mL) can be administered to children. Sometimes the vaccine can be administered in a higher dose e.g. about 1 ml.

[0367] In some instances, the vaccine is administered as a 1, 2, 3, 4, 5, or more dose-course regimen. Sometimes, the vaccine is administered as a 2, 3, or 4 dose-course regimen. Sometimes the vaccine is administered as a 2 dose-course regimen.

[0368] In some instances, the administration of the first dose and second dose of the 2 dose-course regimen are separated by about 0 day, 1 day, 2 days, 5 days, 7 days, 14 days, 21 days, 30 days, 2 months, 4 months, 6 months, 9 months, 1 year, 1.5 years, 2 years, 3 years, 4 years, or more.

[0369] In some instances, the vaccine described herein is administered every 1, 2, 3, 4, 5, 6, 7, 8, 9, 10, or more years. Sometimes, the vaccine described herein is administered every 2, 3, 4, 5, 6, 7, or more years. Sometimes, the vaccine described herein is administered every 4, 5, 6, 7, or more years. Sometimes, the vaccine described herein is administered once.

[0370] The dosage examples are not limiting and are only used to exemplify particular dosing regiments for administering a vaccine described herein. The effective amount for use in humans can be determined from animal models. For example, a dose for humans can be formulated to achieve circulating, liver, topical, and/or gastrointestinal concentrations that have been found to be effective in animals. Based on animal data, and other types of similar data, those skilled in the art can determine the effective amounts of a vaccine composition appropriate for humans.

[0371] The effective amount when referring to an agent or combination of agents will generally mean the dose ranges, modes of administration, formulations, etc., that have been recommended or approved by any of the various regulatory or advisory organizations in the medical or pharmaceutical arts (e.g., FDA, AMA) or by the manufacturer or supplier.

[0372] In some instances, the vaccine is administered before, during, or after the onset of a symptom associated with a disease or condition (e.g., a cancer). Exemplary symptoms can include fever, cough, sore throat, runny and/or stuffy nose, headaches, chills, fatigue, nausea, vomiting, diarrhea, pain, or a combination thereof. In some instances, a vaccine is administered for treatment of a cancer. In some cases, a vaccine is administered for prevention, such as a prophylactic treatment of a cancer. In some cases, a vaccine is administered to illicit an immune response from a patient.

[0373] In some aspects, a vaccine and kit described herein are stored at between 2° C. and 8° C. In some instances, a vaccine is not stored frozen. In some instances, a vaccine is stored in temperatures of such as at −20° C. or −80° C. In some instances, a vaccine is stored away from sunlight.

### Pharmaceutical Compositions and Formulations

[0374] In some embodiments, disclosed herein include pharmaceutical composition and formulations comprising a small molecule fragment of Formula (I). In some instances, also described herein include pharmaceutical composition and formulations comprising a cysteine-containing polypeptide-small molecule fragment adduct. In some instances, the cysteine-containing polypeptide is a polypeptide illustrated in Tables 1-5. In other instances, the cysteine-containing polypeptide is an isolated and purified polypeptide comprising at least 70%, 80%, 85%, 90%, 95%, 96%, 97%, 98%, 99% or more sequence identity to at least seven contiguous amino acids of an amino acid sequence selected from SEQ ID NOs: 1-9655. In some embodiments, the pharmaceutical formulations described herein are administered to a subject by multiple administration routes, including but not limited to, parenteral (e.g., intravenous, subcutaneous, intramuscular), oral, intranasal, buccal, rectal, or transdermal administration routes. In some instances, the pharmaceutical composition describe herein is formulated for parenteral (e.g., intravenous, subcutaneous, intramuscular) administration. In other instances, the pharmaceutical composition describe herein is formulated for oral administration. In still other instances, the pharmaceutical composition describe herein is formulated for intranasal administration.

[0375] In some embodiments, the pharmaceutical formulations include, but are not limited to, aqueous liquid dispersions, self-emulsifying dispersions, solid solutions, liposomal dispersions, aerosols, solid dosage forms, powders, immediate release formulations, controlled release formulations, fast melt formulations, tablets, capsules, pills, delayed release formulations, extended release formulations, pulsatile release formulations, multiparticulate formulations (e.g., nanoparticle formulations), and mixed immediate and controlled release formulations.

[0376] In some embodiments, the pharmaceutical formulations include a carrier or carrier materials selected on the basis of compatibility with the composition disclosed herein, and the release profile properties of the desired dosage form. Exemplary carrier materials include, e.g., binders, suspending agents, disintegration agents, filling agents, surfactants, solubilizers, stabilizers, lubricants, wetting agents, diluents, and the like. Pharmaceutically compatible carrier materials include, but are not limited to, acacia, gelatin, colloidal silicon dioxide, calcium glycerophosphate, calcium lactate, maltodextrin, glycerine, magnesium silicate, polyvinylpyrollidone (PVP), cholesterol, cholesterol esters, sodium caseinate, soy lecithin, taurocholic acid, phosphatidylcholine, sodium chloride, tricalcium phosphate, dipotassium phosphate, cellulose and cellulose conjugates, sugars sodium stearoyl lactylate, carrageenan, monoglyceride, diglyceride, pregelatinized starch, and the like. See, e.g., Remington: The Science and Practice of Pharmacy, Nineteenth Ed (Easton, Pa.: Mack Publishing Company, 1995); Hoover, John E., Remington's Pharmaceutical Sciences, Mack Publishing Co., Easton, Pa. 1975; Liberman, H. A. and Lachman, L., Eds., Pharmaceutical Dosage Forms, Marcel Decker, New York, N.Y., 1980; and Pharmaceutical Dosage Forms and Drug Delivery Systems, Seventh Ed. (Lippincott Williams & Wilkins 1999).

[0377] In some instances, the pharmaceutical formulations further include pH adjusting agents or buffering agents which include acids such as acetic, boric, citric, lactic, phosphoric and hydrochloric acids; bases such as sodium hydroxide, sodium phosphate, sodium borate, sodium citrate, sodium acetate, sodium lactate and tris-hydroxymethylaminomethane; and buffers such as citrate/dextrose, sodium bicarbonate and ammonium chloride. Such acids, bases and buffers are included in an amount required to maintain pH of the composition in an acceptable range.

[0378] In some instances, the pharmaceutical formulation includes one or more salts in an amount required to bring osmolality of the composition into an acceptable range. Such salts include those having sodium, potassium or ammonium cations and chloride, citrate, ascorbate, borate, phosphate, bicarbonate, sulfate, thiosulfate or bisulfite anions; suitable salts include sodium chloride, potassium chloride, sodium thiosulfate, sodium bisulfite and ammonium sulfate.

[0379] In some instances, the pharmaceutical formulations further include diluent which are used to stabilize compounds because they can provide a more stable environment. Salts dissolved in buffered solutions (which also can provide pH control or maintenance) are utilized as diluents in the art, including, but not limited to a phosphate buffered saline solution. In certain instances, diluents increase bulk of the composition to facilitate compression or create sufficient bulk for homogenous blend for capsule filling. Such compounds can include e.g., lactose, starch, mannitol, sorbitol, dextrose, microcrystalline cellulose such as Avicel®; dibasic calcium phosphate, dicalcium phosphate dihydrate; tricalcium phosphate, calcium phosphate; anhydrous lactose, spray-dried lactose; pregelatinized starch, compressible sugar, such as Di-Pac® (Amstar); mannitol, hydroxypropylmethylcellulose, hydroxypropylmethylcellulose acetate stearate, sucrose-based diluents, confectioner's sugar; monobasic calcium sulfate monohydrate, calcium sulfate dihydrate; calcium lactate trihydrate, dextrates; hydrolyzed cereal solids, amylose; powdered cellulose, calcium carbonate; glycine, kaolin; mannitol, sodium chloride; inositol, bentonite, and the like.

[0380] In some cases, the pharmaceutical formulations include disintegration agents or disintegrants to facilitate the breakup or disintegration of a substance. The term “disintegrate” include both the dissolution and dispersion of the dosage form when contacted with gastrointestinal fluid. Examples of disintegration agents include a starch, e.g., a natural starch such as corn starch or potato starch, a pregelatinized starch such as National 1551 or Amijel®, or sodium starch glycolate such as Promogel® or Explotab®, a cellulose such as a wood product, methylcrystalline cellulose, e.g., Avicel®, Avicel® PH101, Avicel® PH102, Avicel® PH105, Elcema® P100, Emcocel®, Vivacel®, Ming Tia®, and Solka-Floc®, methylcellulose, croscarmellose, or a cross-linked cellulose, such as cross-linked sodium carboxymethylcellulose (Ac-Di-Sol®), cross-linked carboxymethylcellulose, or cross-linked croscarmellose, a cross-linked starch such as sodium starch glycolate, a cross-linked polymer such as crospovidone, a cross-linked polyvinylpyrrolidone, alginate such as alginic acid or a salt of alginic acid such as sodium alginate, a clay such as Veegum® HV (magnesium aluminum silicate), a gum such as agar, guar, locust bean, Karaya, pectin, or tragacanth, sodium starch glycolate, bentonite, a natural sponge, a surfactant, a resin such as a cation-exchange resin, citrus pulp, sodium lauryl sulfate, sodium lauryl sulfate in combination starch, and the like.

[0381] In some instances, the pharmaceutical formulations include filling agents such as lactose, calcium carbonate, calcium phosphate, dibasic calcium phosphate, calcium sulfate, microcrystalline cellulose, cellulose powder, dextrose, dextrates, dextran, starches, pregelatinized starch, sucrose, xylitol, lactitol, mannitol, sorbitol, sodium chloride, polyethylene glycol, and the like.

[0382] Lubricants and glidants are also optionally included in the pharmaceutical formulations described herein for preventing, reducing or inhibiting adhesion or friction of materials. Exemplary lubricants include, e.g., stearic acid, calcium hydroxide, talc, sodium stearyl fumerate, a hydrocarbon such as mineral oil, or hydrogenated vegetable oil such as hydrogenated soybean oil (Sterotex®), higher fatty acids and their alkali-metal and alkaline earth metal salts, such as aluminum, calcium, magnesium, zinc, stearic acid, sodium stearates, glycerol, talc, waxes, Stearowet®, boric acid, sodium benzoate, sodium acetate, sodium chloride, leucine, a polyethylene glycol (e.g., PEG-4000) or a methoxypolyethylene glycol such as Carbowax™, sodium oleate, sodium benzoate, glyceryl behenate, polyethylene glycol, magnesium or sodium lauryl sulfate, colloidal silica such as Syloid™, Cab-O-Sil®, a starch such as corn starch, silicone oil, a surfactant, and the like.

[0383] Plasticizers include compounds used to soften the microencapsulation material or film coatings to make them less brittle. Suitable plasticizers include, e.g., polyethylene glycols such as PEG 300, PEG 400, PEG 600, PEG 1450, PEG 3350, and PEG 800, stearic acid, propylene glycol, oleic acid, triethyl cellulose and triacetin. Plasticizers can also function as dispersing agents or wetting agents.

[0384] Solubilizers include compounds such as triacetin, triethylcitrate, ethyl oleate, ethyl caprylate, sodium lauryl sulfate, sodium doccusate, vitamin E TPGS, dimethylacetamide, N-methylpyrrolidone, N-hydroxyethylpyrrolidone, polyvinylpyrrolidone, hydroxypropylmethyl cellulose, hydroxypropyl cyclodextrins, ethanol, n-butanol, isopropyl alcohol, cholesterol, bile salts, polyethylene glycol 200-600, glycofurol, transcutol, propylene glycol, and dimethyl isosorbide and the like.

[0385] Stabilizers include compounds such as any antioxidation agents, buffers, acids, preservatives and the like.

[0386] Suspending agents include compounds such as polyvinylpyrrolidone, e.g., polyvinylpyrrolidone K12, polyvinylpyrrolidone K17, polyvinylpyrrolidone K25, or polyvinylpyrrolidone K30, vinyl pyrrolidone/vinyl acetate copolymer (S630), polyethylene glycol, e.g., the polyethylene glycol can have a molecular weight of about 300 to about 6000, or about 3350 to about 4000, or about 7000 to about 5400, sodium carboxymethylcellulose, methylcellulose, hydroxypropylmethylcellulose, hydroxymethylcellulose acetate stearate, polysorbate-80, hydroxyethylcellulose, sodium alginate, gums, such as, e.g., gum tragacanth and gum acacia, guar gum, xanthans, including xanthan gum, sugars, cellulosics, such as, e.g., sodium carboxymethylcellulose, methylcellulose, sodium carboxymethylcellulose, hydroxypropylmethylcellulose, hydroxyethylcellulose, polysorbate-80, sodium alginate, polyethoxylated sorbitan monolaurate, polyethoxylated sorbitan monolaurate, povidone and the like.

[0387] Surfactants include compounds such as sodium lauryl sulfate, sodium docusate, Tween 60 or 80, triacetin, vitamin E TPGS, sorbitan monooleate, polyoxyethylene sorbitan monooleate, polysorbates, polaxomers, bile salts, glyceryl monostearate, copolymers of ethylene oxide and propylene oxide, e.g., Pluronica (BASF), and the like. Additional surfactants include polyoxyethylene fatty acid glycerides and vegetable oils, e.g., polyoxyethylene (60) hydrogenated castor oil; and polyoxyethylene alkylethers and alkylphenyl ethers, e.g., octoxynol 10, octoxynol 40. Sometimes, surfactants is included to enhance physical stability or for other purposes.

[0388] Viscosity enhancing agents include, e.g., methyl cellulose, xanthan gum, carboxymethyl cellulose, hydroxypropyl cellulose, hydroxypropylmethyl cellulose, hydroxypropylmethyl cellulose acetate stearate, hydroxypropylmethyl cellulose phthalate, carbomer, polyvinyl alcohol, alginates, acacia, chitosans, and combinations thereof.

[0389] Wetting agents include compounds such as oleic acid, glyceryl monostearate, sorbitan monooleate, sorbitan monolaurate, triethanolamine oleate, polyoxyethylene sorbitan monooleate, polyoxyethylene sorbitan monolaurate, sodium docusate, sodium oleate, sodium lauryl sulfate, sodium doccusate, triacetin, Tween 80, vitamin E TPGS, ammonium salts, and the like.

### Therapeutic Regimens for a Pharmaceutical Composition

[0390] In some embodiments, pharmaceutical compositions described herein are administered for therapeutic applications. In some embodiments, the pharmaceutical composition is administered once per day, twice per day, three times per day or more. The pharmaceutical composition is administered daily, every day, every alternate day, five days a week, once a week, every other week, two weeks per month, three weeks per month, once a month, twice a month, three times per month, or more. The pharmaceutical composition is administered for at least 1 month, 2 months, 3 months, 4 months, 5 months, 6 months, 7 months, 8 months, 9 months, 10 months, 11 months, 12 months, 18 months, 2 years, 3 years, or more.

[0391] In the case wherein the patient's status does improve, upon the doctor's discretion the administration of the composition is given continuously; alternatively, the dose of the composition being administered is temporarily reduced or temporarily suspended for a certain length of time (i.e., a “drug holiday”). In some instances, the length of the drug holiday varies between 2 days and 1 year, including by way of example only, 2 days, 3 days, 4 days, 5 days, 6 days, 7 days, 10 days, 12 days, 15 days, 20 days, 28 days, 35 days, 50 days, 70 days, 100 days, 120 days, 150 days, 180 days, 200 days, 250 days, 280 days, 300 days, 320 days, 350 days, or 365 days. The dose reduction during a drug holiday is from 10%-100%, including, by way of example only, 10%, 15%, 20%, 25%, 30%, 35%, 40%, 45%, 50%, 55%, 60%, 65%, 70%, 75%, 80%, 85%, 90%, 95%, or 100%.

[0392] Once improvement of the patient's conditions has occurred, a maintenance dose is administered if necessary. Subsequently, the dosage or the frequency of administration, or both, can be reduced, as a function of the symptoms, to a level at which the improved disease, disorder or condition is retained.

[0393] In some embodiments, the amount of a given agent that corresponds to such an amount varies depending upon factors such as the particular compound, the severity of the disease, the identity (e.g., weight) of the subject or host in need of treatment, but nevertheless is routinely determined in a manner known in the art according to the particular circumstances surrounding the case, including, e.g., the specific agent being administered, the route of administration, and the subject or host being treated. In some instances, the desired dose is conveniently presented in a single dose or as divided doses administered simultaneously (or over a short period of time) or at appropriate intervals, for example as two, three, four or more sub-doses per day.

[0394] The foregoing ranges are merely suggestive, as the number of variables in regard to an individual treatment regime is large, and considerable excursions from these recommended values are not uncommon. Such dosages are altered depending on a number of variables, not limited to the activity of the compound used, the disease or condition to be treated, the mode of administration, the requirements of the individual subject, the severity of the disease or condition being treated, and the judgment of the practitioner.

[0395] In some embodiments, toxicity and therapeutic efficacy of such therapeutic regimens are determined by standard pharmaceutical procedures in cell cultures or experimental animals, including, but not limited to, the determination of the LD50 (the dose lethal to 50% of the population) and the ED50 (the dose therapeutically effective in 50% of the population). The dose ratio between the toxic and therapeutic effects is the therapeutic index and it is expressed as the ratio between LD50 and ED50. Compounds exhibiting high therapeutic indices are preferred. The data obtained from cell culture assays and animal studies are used in formulating a range of dosage for use in human. The dosage of such compounds lies preferably within a range of circulating concentrations that include the ED50 with minimal toxicity. The dosage varies within this range depending upon the dosage form employed and the route of administration utilized.

### Kits/Article of Manufacture

[0396] Disclosed herein, in certain embodiments, are kits and articles of manufacture for use with one or more methods described herein. Such kits include a carrier, package, or container that is compartmentalized to receive one or more containers such as vials, tubes, and the like, each of the container(s) comprising one of the separate elements to be used in a method described herein. Suitable containers include, for example, bottles, vials, syringes, and test tubes. In one embodiment, the containers are formed from a variety of materials such as glass or plastic.

[0397] The articles of manufacture provided herein contain packaging materials. Examples of pharmaceutical packaging materials include, but are not limited to, blister packs, bottles, tubes, bags, containers, bottles, and any packaging material suitable for a selected formulation and intended mode of administration and treatment.

[0398] For example, the container(s) include a small molecule fragment disclosed herein or an antibody that recognizes a cysteine-containing polypeptide-small molecule fragment adduct described herein. Such kits optionally include an identifying description or label or instructions relating to its use in the methods described herein.

[0399] A kit typically includes labels listing contents and/or instructions for use, and package inserts with instructions for use. A set of instructions will also typically be included.

[0400] In one embodiment, a label is on or associated with the container. In one embodiment, a label is on a container when letters, numbers or other characters forming the label are attached, molded or etched into the container itself; a label is associated with a container when it is present within a receptacle or carrier that also holds the container, e.g., as a package insert. In one embodiment, a label is used to indicate that the contents are to be used for a specific therapeutic application. The label also indicates directions for use of the contents, such as in the methods described herein.

[0401] In certain embodiments, the pharmaceutical compositions are presented in a pack or dispenser device which contains one or more unit dosage forms containing a compound provided herein. The pack, for example, contains metal or plastic foil, such as a blister pack. In one embodiment, the pack or dispenser device is accompanied by instructions for administration. In one embodiment, the pack or dispenser is also accompanied with a notice associated with the container in form prescribed by a governmental agency regulating the manufacture, use, or sale of pharmaceuticals, which notice is reflective of approval by the agency of the form of the drug for human or veterinary administration. Such notice, for example, is the labeling approved by the U.S. Food and Drug Administration for prescription drugs, or the approved product insert. In one embodiment, compositions containing a compound provided herein formulated in a compatible pharmaceutical carrier are also prepared, placed in an appropriate container, and labeled for treatment of an indicated condition.

### Certain Terminology

[0402] Unless defined otherwise, all technical and scientific terms used herein have the same meaning as is commonly understood by one of skill in the art to which the claimed subject matter belongs. It is to be understood that the foregoing general description and the following detailed description are exemplary and explanatory only and are not restrictive of any subject matter claimed. In this application, the use of the singular includes the plural unless specifically stated otherwise. It must be noted that, as used in the specification and the appended claims, the singular forms “a,” “an,” and “the” include plural referents unless the context clearly dictates otherwise. In this application, the use of “or” means “and/or” unless stated otherwise. Furthermore, use of the term “including” as well as other forms, such as “include”, “includes,” and “included,” is not limiting.

[0403] As used herein, ranges and amounts can be expressed as “about” a particular value or range. About also includes the exact amount. Hence “about 5 μL” means “about 5 μL” and also “5 μL.” Generally, the term “about” includes an amount that would be expected to be within experimental error.

[0404] The section headings used herein are for organizational purposes only and are not to be construed as limiting the subject matter described.

[0405] As used herein, the terms “individual(s)”, “subject(s)” and “patient(s)” mean any mammal. In some embodiments, the mammal is a human. In some embodiments, the mammal is a non-human. None of the terms require or are limited to situations characterized by the supervision (e.g. constant or intermittent) of a health care worker (e.g. a doctor, a registered nurse, a nurse practitioner, a physician's assistant, an orderly or a hospice worker).

[0406] “Antibodies” and “immunoglobulins” (Igs) are glycoproteins having the same structural characteristics. The terms are used synonymously. In some instances, the antigen specificity of the immunoglobulin is known.

[0407] The term “antibody” is used in the broadest sense and covers fully assembled antibodies, antibody fragments that can bind antigen (e.g., Fab, F(ab′)₂, Fv, single chain antibodies, diabodies, antibody chimeras, hybrid antibodies, bispecific antibodies, humanized antibodies, and the like), and recombinant peptides comprising the forgoing.

[0408] The terms “monoclonal antibody” and “mAb” as used herein refer to an antibody obtained from a substantially homogeneous population of antibodies, i.e., the individual antibodies comprising the population are identical except for possible naturally occurring mutations that may be present in minor amounts.

[0409] Native antibodies” and “native immunoglobulins” are usually heterotetrameric glycoproteins of about 150,000 daltons, composed of two identical light (L) chains and two identical heavy (H) chains. Each light chain is linked to a heavy chain by one covalent disulfide bond, while the number of disulfide linkages varies among the heavy chains of different immunoglobulin isotypes. Each heavy and light chain also has regularly spaced intrachain disulfide bridges. Each heavy chain has at one end a variable domain (V_{H}) followed by a number of constant domains. Each light chain has a variable domain at one end (V_{L}) and a constant domain at its other end; the constant domain of the light chain is aligned with the first constant domain of the heavy chain, and the light chain variable domain is aligned with the variable domain of the heavy chain. Particular amino acid residues are believed to form an interface between the light and heavy-chain variable domains.

[0410] The term “variable” refers to the fact that certain portions of the variable domains differ extensively in sequence among antibodies. Variable regions confer antigen-binding specificity. However, the variability is not evenly distributed throughout the variable domains of antibodies. It is concentrated in three segments called complementarity determining regions (CDRs) or hypervariable regions, both in the light chain and the heavy-chain variable domains. The more highly conserved portions of variable domains are celled in the framework (FR) regions. The variable domains of native heavy and light chains each comprise four FR regions, largely adopting a f-pleated-sheet configuration, connected by three CDRs, which form loops connecting, and in some cases forming part of, the 3-pleated-sheet structure. The CDRs in each chain are held together in close proximity by the FR regions and, with the CDRs from the other chain, contribute to the formation of the antigen-binding site of antibodies (see, Kabat et al. (1991) NIH PubL. No. 91-3242, Vol. I, pages 647-669). The constant domains are not involved directly in binding an antibody to an antigen, but exhibit various effector functions, such as Fc receptor (FcR) binding, participation of the antibody in antibody-dependent cellular toxicity, initiation of complement dependent cytotoxicity, and mast cell degranulation.

[0411] The term “hypervariable region,” when used herein, refers to the amino acid residues of an antibody that are responsible for antigen-binding. The hypervariable region comprises, amino acid residues from a “complementarily determining region” or “CDR” (i.e., residues 24-34 (L1), 50-56 (L2), and 89-97 (L3) in the light-chain variable domain and 31-35 (H1), 50-65 (H2), and 95-102 (H3) in the heavy-chain variable domain; Kabat et al. (1991) Sequences of Proteins of Immunological Interest, 5th Ed. Public Health Service, National Institute of Health, Bethesda, Md.) and/or those residues from a “hypervariable loop” (i.e., residues 26-32 (L1), 50-52 (L2), and 91-96 (L3) in the light-chain variable domain and (H1), 53-55 (H2), and 96-101 (13) in the heavy chain variable domain; Clothia and Lesk, (1987) J. Mol. Biol., 196:901-917). “Framework” or “FR” residues are those variable domain residues other than the hypervariable region residues, as herein deemed.

[0412] “Antibody fragments” comprise a portion of an intact antibody, preferably the antigen-binding or variable region of the intact antibody. Examples of antibody fragments include Fab, Fab, F(ab′)2, and Fv fragments; diabodies; linear antibodies (Zapata et al. (1995) Protein Eng. 10:1057-1062); single-chain antibody molecules; and multispecific antibodies formed from antibody fragments. Papain digestion of antibodies produces two identical antigen-binding fragments, called “Fab” fragments, each with a single antigen-binding site, and a residual “Fc” fragment, whose name reflects its ability to crystallize readily. Pepsin treatment yields an F(ab′)2 fragment that has two antigen-combining sites and is still capable of cross-linking antigen.

[0413] “Fv” is the minimum antibody fragment that contains a complete antigen recognition and binding site. This region consists of a dimer of one heavy- and one light-chain variable domain in tight, non-covalent association. It is in this configuration that the three CDRs of each variable domain interact to define an antigen-binding site on the surface of the V_{H}-V_{L} dimer. Collectively, the six CDRs confer antigen-binding specificity to the antibody. However, even a single variable domain (or half of an Fv comprising only three CDRs specific for an antigen) has the ability to recognize and bind antigen, although at a lower affinity than the entire binding site.

[0414] The Fab fragment also contains the constant domain of the light chain and the first constant domain (C_{H1}) of the heavy chain. Fab fragments differ from Fab′ fragments by the addition of a few residues at the carboxy terminus of the heavy chain C_{H1} domain including one or more cysteines from the antibody hinge region. Fab′-SH is the designation herein for Fab′ in which the cysteine residue(s) of the constant domains bear a free thiol group. Fab′ fragments are produced by reducing the F(ab′)2 fragment's heavy chain disulfide bridge. Other chemical couplings of antibody fragments are also known.

[0415] The “light chains” of antibodies (immunoglobulins) from any vertebrate species can be assigned to one of two clearly distinct types, called kappa (κ) and lambda (λ), based on the amino acid sequences of their constant domains.

[0416] Depending on the amino acid sequence of the constant domain of their heavy chains, immunoglobulins can be assigned to different classes. There are five major classes of human immunoglobulins: IgA, IgD, IgE, IgG, and IgM, and several of these may be further divided into subclasses (isotypes), e.g., IgG, IgG2, IgG3, IgG4, IgA1, and IgA2. The heavy-chain constant domains that correspond to the different classes of immunoglobulins are called alpha, delta, epsilon, gamma, and mu, respectively. The subunit structures and three-dimensional configurations of different classes of immunoglobulins are well known. Different isotypes have different effector functions. For example, human IgG1 and IgG3 isotypes have ADCC (antibody dependent cell-mediated cytotoxicity) activity.

[0417] The term “alkyl” as used herein is a branched or unbranched saturated hydrocarbon group of 1 to 24 carbon atoms, such as methyl, ethyl, n-propyl, isopropyl, n-butyl, isobutyl, s-butyl, t-butyl, n-pentyl, isopentyl, s-pentyl, neopentyl, hexyl, heptyl, octyl, nonyl, decyl, dode cyl, tetradecyl, hexadecyl, eicosyl, tetracosyl, and the like. It is understood that the alkyl group is acyclic. In some instances, the alkyl group is branched or unbranched. In some instances, the alkyl group is also substituted or unsubstituted. For example, the alkyl group is substituted with one or more groups including, but not limited to, alkyl, cycloalkyl, alkoxy, amino, ether, halide, hydroxy, nitro, silyl, sulfo-oxo, or thiol. A “lower alkyl” group is an alkyl group containing from one to six (e.g., from one to four) carbon atoms. In some instances, the term alkyl group is also a C1 alkyl, C1-C2 alkyl, C1-C3 alkyl, C1-C4 alkyl, C1-C5 alkyl, C1-C6 alkyl, C1-C7 alkyl, C1-C8 alkyl, C1-C9 alkyl, C1-C10 alkyl, and the like up to and including a C1-C24 alkyl.

[0418] The term “aryl” as used herein is a group that contains any carbon-based aromatic group including, but not limited to, benzene, naphthalene, phenyl, biphenyl, anthracene, and the like. The aryl group can be substituted or unsubstituted. In some instances, the aryl group is substituted with one or more groups including, but not limited to, alkyl, cycloalkyl, alkoxy, alkenyl, cycloalkenyl, alkynyl, cycloalkynyl, aryl, heteroaryl, aldehyde, —NH₂, carboxylic acid, ester, ether, halide, hydroxy, ketone, azide, nitro, silyl, sulfo-oxo, or thiol. The term “biaryl” is a specific type of aryl group and is included in the definition of “aryl.” In addition, the aryl group is optionally a single ring structure or comprise multiple ring structures that are either fused ring structures or attached via one or more bridging groups such as a carbon-carbon bond. For example, biaryl refers to two aryl groups that are bound together via a fused ring structure, as in naphthalene, or are attached via one or more carbon-carbon bonds, as in biphenyl.

### EXAMPLES

[0419] These examples are provided for illustrative purposes only and not to limit the scope of the claims provided herein.

### Example 1

### General Synthetic Methods

[0420] Chemicals and reagents were purchased from a variety of vendors, including Sigma Aldrich, Acros, Fisher, Fluka, Santa Cruz, CombiBlocks, BioBlocks, and Matrix Scientific, and were used without further purification, unless noted otherwise. Anhydrous solvents were obtained as commercially available pre-dried, oxygen-free formulations. Flash chromatography was carried out using 230-400 mesh silica gel. Preparative thin layer chromotography (PTLC) was carried out using glass backed PTLC plates 500-2000 μm thickness (Analtech). All reactions were monitored by thin layer chromatography carried out on 0.25 mm E. Merck silica gel plates (60F-254) and visualized with UV light, or by ninhydrin, ethanolic phosphomolybdic acid, iodine, p-anisaldehyde or potassium permanganate stain. NMR spectra were recorded on Varian INOVA-400, Bruker DRX-600 or Bruker DRX-500 spectrometers in the indicated solvent. Multiplicities are reported with the following abbreviations: s singlet; d doublet; t triplet; q quartet; p pentet; m multiplet; br broad. Chemical shifts were reported in ppm relative to TMS and J values were reported in Hz. Mass spectrometry data were collected on a HP1100 single-quadrupole instrument (ESI; low resolution) or an Agilent ESI-TOF instrument (HRMS).

[0421] In some embodiments, General Procedure A was used for the synthesis of one or more of the small molecule fragments and/or cysteine-reactive probes described herein. The amine was dissolved in anhydrous CH₂Cl₂ (0.2 M) and cooled to 0° C. To this, anhydrous pyridine (1.5 equiv.) was added in one portion, then chloroacetyl chloride (1.5 equiv.) dropwise and the reaction was monitored by TLC until complete disappearance of starting material and conversion to product was detected (typically 1 h). If the reaction did not proceed to completion, additional aliquots of pyridine (0.5 equiv.) and chloroacetyl chloride (0.5 equiv.) were added. The reaction was quenched with H₂O (1 mL), diluted with CH₂Cl₂ (20 mL), and washed twice with saturated NaHCO₃ (100 mL). The organic layer was concentrated in vacuo and purified by preparatory thin layer or flash column chromatography to afford the desired product. In some embodiments, General Procedure A1 is similar to General Procedure A except triethylamine (3 equiv.) was used instead of pyridine. In some embodiments, General Procedure A2 is similar to General Procedure A except N-methylmorpholine (3 equiv.) was used instead of pyridine.

[0422] In some embodiments, General Procedure B was used for the synthesis of one or more of the small molecule fragments and/or cysteine-reactive probes described herein. The amine was dissolved in anhydrous CH₂Cl₂ (0.2 M) and cooled to 0° C. To this, triethylamine (TEA, 1.5 equiv.), was added in one portion, then acryloyl chloride (1.5 equiv.) dropwise, and the reaction was monitored by TLC until complete disappearance of starting material and conversion to product was detected (typically 1 h). If the reaction did not proceed to completion, additional aliquots of TEA (0.5 equiv.) and acryloyl chloride (0.5 equiv.) were added. The reaction was quenched with H₂O (1 mL), diluted with CH₂Cl₂ (20 mL), and washed twice with saturated NaHCO₃ (100 mL). The organic layer was passed through a plug of silica, after which, the eluant was concentrated in vacuo and purified by preparatory thin layer or flash column chromatography to afford the desired product.

[0423] In some embodiments, General Procedure C was used for the synthesis of one or more of the small molecule fragments and/or cysteine-reactive probes described herein. Acryloyl chloride (80.4 μL, 1.0 mmol, 2 equiv.) was dissolved in anhydrous CH₂Cl₂ (4 mL) and cooled to 0° C. A solution of the amine (0.5 mmol, 1 equiv.) and N-methylmorpholine (0.16 mL, 1.5 mmol, 3 equiv.) in CH₂Cl₂ (2 mL) was then added dropwise. The reaction was stirred for 1 hr at 0° C. then allowed to warm up to room temperature slowly. After TLC analysis showed disappearance of starting material, or 6 h, whichever was sooner, the reaction was quenched with saturated aqueous NaHCO₃ (5 mL) and extracted with CH₂Cl₂ (3×10 mL). The combined organic layers were dried over anhydrous Na₂SO₄, concentrated in vacuo, and the residue obtained was purified by preparatory thin layer chromatography to afford the desired product.

### Synthesis of Probes and Fragments

### Purchased Fragments

[0424] The following electrophilic fragments were purchased from the indicated vendors. 2 (Santa Cruz Biotechnology sc-345083), 3 (Key Organics JS-092C), 4 (Sigma Aldrich T142433-10 mg), 6 (Toronto Research Chemicals M320600), 8 (Alfa Aesar H33763), 10 (Santa Cruz Biotechnology sc-345060), 11 (Santa Cruz Biotechnology sc-354895), 12 (Santa Cruz Biotechnology sc-354966), 21 (Santa Cruz Biotechnology, sc-279681), 22 (Sigma Aldrich 699357-5G), 26 (Sigma Aldrich T109959), 27 (Santa Cruz Biotechnology sc-342184), 28 (Santa Cruz Biotechnology sc-335173), 29 (Santa Cruz Biotechnology sc-348978), 30 (Santa Cruz Biotechnology sc-355362), 32 (Santa Cruz Biotechnology sc-354613), 33 (Sigma Aldrich R996505), 34 (Santa Cruz Biotechnology sc-355477), 35 (Santa Cruz Biotechnology sc-328985), 41 (Sigma Aldrich L469769), 42 (Sigma Aldrich R901946), 43 (Santa Cruz Biotechnology sc-307626), 52 (Enamine, EN300-08075), 55 (Santa Cruz Biotechnology sc-354880), 57 (VWR 100268-442), 58 (Enzo Life Sciences ALX-430-142-M005), 62 (WuXi Apptec). Synthesis of isotopically-labeled TEV-tags:

[chemical structure]

[0425] Isotopically-labeled heavy and light tags were synthesized with minor modifications to the procedure reported in Weerapana et al. Nat Protoc 2:1414-1425 (2007) and Weerapana et al. Nature 468:790-795 (2010). Fmoc-Rink-Amide-MBHA resin (EMD Biosciences; 0.5 M, 830 mg, 0.6 mmol/g loading) was deprotected with 4-methylpiperidine in DMF (50% v/v, 2×5 mL, 1 min). Fmoc-Lys(N₃)—OH (Anaspec) (500 mg, 1.26 mmol, 1.26 equiv.) was coupled to the resin overnight at room temperature with DIEA (113 μl) and 2-(6-chloro-1H-benzotriazole-1-yl)-, 1,3,3-tetramethylaminium hexafluorophosphate (HCTU; 1.3 mL of 0.5 M stock in DMF) followed by a second overnight coupling with Fmoc-Lys(N₃)—OH (500 mg, 1.26 mmol, 1.26 equiv.), DIEA (113 μl), O-(7-azabenzotriazol-1-yl)-N,N,N′,N-tetramethyluronium hexafluorophosphate (HATU; 1.3 mL of 0.5 M stock in DMF). Unmodified resin was then capped (2×30 min) with Ac₂P (400 μL) and DIEA (700 μL) in DMF after which the resin was washed with DMF (2×1 min). Deprotection with 4-methylpiperidine in DMF (50% v/v, 2×5 mL, 1 min) and coupling cycles (4 equiv. Fmoc-protected amino acid (EMD biosciences) in DMF) with HCTU (2 mL, 0.5 M in DMF) and DIEA (347.7 μL) were then repeated for the remaining amino acids. For the heavy TEV-tag, Fmoc-Valine-OH (¹³C₅C₁₅H₂₁¹⁵NO₄, ¹³C₅, 97-99%, ¹⁵N, 97-99%, Cambridge Isotope Laboratories, Inc.) was used. Reactions were monitored by ninhydrin stain and dual couplings were used for all steps that did not go to completion. Biotin (0.24 g, 2 equiv.) was coupled for two days at room temperature with NHS (0.1 g, 2 equiv.), DIC (0.16 g, 2 equiv.) and DIEA (0.175 g, 2 equiv.). The resin was then washed with DMF (5 mL, 2×1 min) followed by 1:1 CH₂Cl₂:MeOH (5 mL, 2×1 min), dried under a stream of nitrogen and transferred to a round-bottom flask. The peptides were cleaved for 90 minutes from the resin by treatment with 95:2.5:2.5 trifluoroacetic acid: water:triisopropylsilane. The resin was removed by filtration and the remaining solution was triturated with cold ether to provide either the light or heavy TEV-tag as a white solid. HPLC-MS revealed only minor impurities and the compounds were used without further purification. HRMS-ESI (m/z): calculated for C₈₃H₁₂₈N₂₃O₂₃S [M+H]: (Light-TEV-Tag) 1846.9268; found: 1846.9187; calculated for C₇₈¹³C₅H₁₂₈N₂₂¹⁵NO₂₃S [M+H]: (Heavy-TEV-Tag): 1852.9237; found: 1852.9309.

### Synthesis of Probes and Fragments

### Synthesis of 1

[chemical structure]

### N-(hex-5-yn-1-yl)-2-chloroacetamide (SI-1)

[chemical structure]

[0428] To a solution of 5-hexenylamine (63 mg, 0.65 mmol, 1.0 equiv.) in CH₂Cl₂ (3.2 mL, 0.2 M) at 0° C. was added N-methylmorpholine (215 μL, 3 equiv.) followed by chloroacetic anhydride portionwise (222 mg, 2 equiv.). The reaction was allowed to come to room temperature and then stirred overnight. The reaction was then diluted with ether (50 mL), washed with 1 M HCl, 1 M NaOH, then brine (20 mL each). The combined organic layers were dried over magnesium sulfate and concentrated to yield chloroacetamide SI-1 (74 mg, 66%). ¹H NMR (400 MHz, Chloroform-d) δ 6.79 (s, 1H), 4.09 (d, J=1.1 Hz, 2H), 3.34 (q, J=6.8 Hz, 2H), 2.23 (td, J=6.9, 2.7 Hz, 2H), 1.98 (t, J=2.7 Hz, 1H), 1.75-1.62 (m, 4H), 1.62-1.51 (m, 2H).

### N-(hex-5-yn-1-yl)-2-iodoacetamide (1)

[chemical structure]

[0430] To a solution of chloroacetamide SI-1 (36.1 mg, 0.2 mmol) in acetone (1 mL, 0.2 M) was added sodium iodide (47 mg, 1.5 equiv.) and the reaction was stirred overnight. The next day the reaction was filtered through a plug of silica eluting with 20% ethyl acetate in hexanes, and the filtrate was concentrated to yield a 10:1 mixture of the desired iodoacetamide 1 and starting material. This mixture was re-subjected to the reaction conditions for one further day, at which point complete conversion was observed. The product was purified by silica gel chromatography, utilizing a gradient of 5 to 10 to 15 to 20% ethyl acetate in hexanes to yield the desired product (24 mg, 44%). In some embodiments, the reaction is performed with 2.5 equiv. of sodium iodide, in which case re-subjection is not necessary, and purification by PTLC is accomplished in 30% EtOAc/hexanes as eluent. ¹H NMR (500 MHz, Chloroform-d) δ 6.16 (s, 1H), 3.69 (s, 2H), 3.30 (q, J=6.8 Hz, 2H), 2.23 (td, J=6.8, 2.6 Hz, 2H), 1.97 (t, J=2.6 Hz, 1H), 1.75-1.61 (m, 2H), 1.61-1.52 (m, 2H). N-(4-bromophenyl)-N-phenylacrylamide (5)

[chemical structure]

[0431] The title compound was synthesized according to General Procedure C from 4-bromophenylaniline (18.9 mg, 0.0762 mmol, 1 equiv.). Purification of the crude product by prep. TLC (30% EtOAc/hexanes) provided the title compound as a white solid (12.5 mg, 54%). ¹H NMR (500 MHz, Chloroform-d) δ 7.47 (d, J=8.2 Hz, 2H), 7.39 (t, J=7.6 Hz, 2H), 7.32 (d, J=7.4 Hz, 1H), 7.21 (d, J=7.7 Hz, 2H), 7.12 (d, J=8.2 Hz, 2H), 6.48 (d, J=16.7 Hz, 1H), 6.17 (dd, J=16.8, 10.3 Hz, 1H), 5.65 (d, J=10.3 Hz, 1H); HRMS-ESI (m/z) calculated for C₁₅H₁₃BrNO [M+H]: 302.0175; found: 302.0176.

### Synthesis of 7

[chemical structure]

### tert-butyl 4-(phenylamino)piperidine-1-carboxylate (SI-2)

[chemical structure]

[0434] SI-2 was prepared according to Thoma et al, J. Med. Chem. 47:1939-1955 (2004). ¹H NMR (400 MHz, Chloroform-d) δ 7.24-7.12 (m, 2H), 6.75-6.68 (m, 1H), 6.66-6.58 (m, 2H), 3.88-3.81 (m, 1H), 3.44 (tt, J=10.4, 3.9 Hz, 2H), 3.00-2.88 (m, 2H), 2.10-1.99 (m, 2H), 1.48 (bs 9H), 1.41-1.27 (m, 2H).

### tert-butyl 4-(2-chloro-N-phenylacetamido)piperidine-1-carboxylate (SI-3)

[chemical structure]

[0436] To a solution of aniline SI-2 (65 mg, 0.24 mmol) at 0° C. in CH₂Cl₂ (0.6 mL) was added pyridine (38 μL, 2 equiv.) followed by chloroacetyl chloride (37.4 μL, 2.0 equiv.) in CH₂Cl₂ (0.6 mL). The resulting solution was allowed to warm to room temperature and stirred overnight. The solution was then quenched with saturated aqueous sodium bicarbonate, extracted with Et₂O (3×10 mL). The combined organic layers were dried over magnesium sulfate, filtered and concentrated to give an off-white solid, which was used without further purification (47 mg, 57%). ¹H NMR (400 MHz, Chloroform-d) δ 7.47-7.38 (m, 3H), 7.18-7.03 (m, 2H), 4.75-4.63 (m, 1H), 4.07 (s, 2H), 3.68 (s, 2H), 2.76 (s, 2H), 1.84-1.69 (m, 2H), 1.35 (s, 9H), 1.27-1.12 (m, 2H).

### N-(1-benzoylpiperidin-4-yl)-2-chloro-N-phenylacetamide (7)

[chemical structure]

[0438] To neat SI-3 (47 mg, 0.128 mmol) was added trifluoroacetic acid (0.7 mL, final 0.2 M). The resulting solution was concentrated under a stream of nitrogen until no further evaporation was observed, providing the deprotected amine as its trifluoroacetate salt. This viscous gum was then treated with triethylamine in ethyl acetate (10% v/v, 2 mL; solution smokes upon addition). The resulting solution was concentrated to afford the free base, which contained only triethylammonium trifluoroacetate and the free amine by proton NMR. A stock solution was prepared by dissolving the resulting gum in CH₂Cl₂ (1.2 mL, ˜0.1 M final).

[0439] The deprotected amine (0.3 mL of stock solution, 0.0319 mmol) was treated with Hunig's base (17.5 μL, 3 equiv.) and benzoyl chloride (7.6 μL, 2.0 equiv.). This solution was stirred overnight, quenched with saturated aqueous sodium bicarbonate, extracted with Et₂O (3×10 mL). The resulting solution was dried over magnesium sulfate, filtered and concentrated. The resulting oil was purified by silica gel chromatography (20% EtOAc/hexanes) to afford chloroacetamide 7 as a white solid (8.6 mg, 75%). ¹H NMR (500 MHz, Chloroform-d) δ 7.55 (dd, J=5.5, 3.0 Hz, 3H), 7.50-7.32 (m, 5H), 7.21 (s, 2H), 4.92 (tt, J=12.3, 4.0 Hz, 1H), 4.87 (s, 1H), 3.87 (s, 1H), 3.78 (s, 2H), 3.21 (s, 1H), 2.97-2.90 (m, 1H), 2.01 (s, 1H), 1.90 (s, 1H), 1.45 (s, 1H), 1.36-1.26 (m, 1H); HRMS-ESI (m/z) calculated for C₂₀H₂₂ClN₂O₂ [M+H]: 357.1364; found: 357.1362.

### 1-(4-benzylpiperidin-J-yl)-2-chloroethan-1-one (9)

[chemical structure]

[0441] Following General Procedure A, starting from 4-benzylpiperidine (840 mg, 5.2 mmol, 1 equiv.), the desired compound was obtained after column chromatography as a yellow oil (1 g, 81%). Spectroscopic data matches those reported previously reported in Papadopoulou et al. J. Med. Chem. 55:5554-5565 (2012). ¹H NMR (500 MHz, Chloroform-d) δ 7.42-7.14 (m, 5H), 4.61 (d, J=13.4 Hz, 1H), 4.14 (q, J=21.9, 11.5 Hz, 2H), 3.89 (d, J=13.5, 1H), 3.11 (td, J=13.1, 2.7 Hz, 1H), 2.69-2.57 (m, 3H), 1.92-1.75 (m, 3H), 1.40-1.21 (m, 2H); HRMS-ESI (m/z) calculated for C₁₄H₁₉ClNO [M+H]: 252.115; found: 252.115.

### N-(2-(1H-indol-3-yl)ethyl)-2-chloroacetamide (13)

[chemical structure]

[0443] Following General Procedure A, starting from tryptamine (400 mg, 2.5 mmol, 1 equiv.), the desired compound was obtained after column chromatography as a brownish solid (460 mg, 77%). ¹H NMR (500 MHz, Chloroform-d) δ 8.55 (s, 1H), 7.70 (d, J=7.9 Hz, 1H), 7.45 (d, J=8.1 Hz, 1H), 7.30 (t, J=7.5 Hz, 1H), 7.23 (t, J=7.4 Hz, 1H), 7.10 (s, 1H), 6.84 (s, 1H), 4.08 (s, 2H), 3.72 (q, J=6.4 Hz, 2H), 3.10 (t, J=6.8 Hz, 2H); HRMS-ESI (m/z) calculated for C₁₂H₁₄ClN₂O₂ [M+H]: 237.0789; found: 237.0791.

### N-(3,5-bis(trifluoromethyl)phenyl)acrylamide (14)

[chemical structure]

[0445] Following General Procedure B, starting from 3,5-bis(trifluoromethyl)aniline (1.16 g, 5 mmol, 1 equiv.), the desired compound was obtained after column chromatography as a white solid (1.05 g, 74%). ¹H NMR (500 MHz, Chloroform-d) δ 8.33 (s, 1H), 8.18 (s, 2H), 7.68 (s, 1H), 6.57 (d, J=17.5 Hz, 1H), 6.38 (dd, J=16.9, 10.3 Hz, 1H), 5.93 (d, J=12.5 Hz, 1H); HRMS-ESI (m/z) calculated for C₁₁H₈F₆NO₂ [M+H]: 284.0505; found: 284.0504.

### N-(4-phenoxy-3-(trifluoromethyl)phenyl)-N-(pyridin-3-ylmethyl)acrylamide (15)

[chemical structure]

[0447] 4-phenoxy-3-(trifluoromethyl)aniline (260 mg, 1 mmol, 1 equiv.) (Combi-Blocks) was dissolved in TFA (5 mL). Following the reductive amination protocol reported by Boros et al. J. Org. Chem 74:3587-3590 (2009), the reaction mixture was cooled to 0° C. and to this sodium triacetoxyborohydride (STAB) (270 mg, 1.3 mmol, 1.3 equiv.) was added. 3-pyridinecarboxaldehyde (200 mg, 2 mmol, 2 equiv.) was dissolved in CH₂Cl₂ (5 mL) and slowly added to the reaction mixture. Upon complete conversion to product, the reaction was diluted with CH₂Cl₂ (20 mL) and washed with saturated sodium bicarbonate solution (3×20 mL) and the organic layer was dried then concentrated under reduced pressure. Without further purification the crude material was dissolved in anhydrous CH₂Cl₂ and subjected to General Procedure B. The resulting crude was purified by prep. TLC to give a white solid (31 mg, 10%). ¹H NMR (500 MHz, Chloroform-d) δ 8.52 (d, J=3.5 Hz, 1H), 8.39 (s, 1H), 7.68 (d, J=7.8. Hz, 1H), 7.40 (t, J=7.7 Hz, 2H), 7.34 (s, 1H), 7.28-7.18 (m, 2H), 7.07 (d, J=8.2 Hz, 2H), 6.98 (d, J=7.5 Hz, 1H), 6.82 (d, J=8.8 Hz, 1H), 6.46 (d, J=16.8 Hz, 1H), 6.01 (dd, J=16.2, 10.7 Hz, 1H), 5.64 (d, J=10.3 Hz, 1H), 4.96 (s, 2H). HRMS-ESI (m/z) calculated for C₂₂H₁₈F₃N₂O₂ [M+H]: 399.1315; found: 399.1315.

### Iodoacetamide-rhodamine (16)

[chemical structure]

[0449] 5-(and-6)-((N-(5-aminopentyl)amino)carbonyl)tetramethylrhodamine (tetramethylrhodamine cadaverine) mixed isomers (60 mg, 0.12 mmol, 1 equiv.) were dissolved in anhydrous DMF (500 μL) with sonication. To this was added DIPEA (60 μL, 0.34 mmol, 3 equiv.) and chloroacetyl chloride (10 μL, 0.13 mmol, 1 equiv., diluted 1:10 in DMF) and the reaction was stirred at room temperature for 20 min until complete conversion to the product was detected by TLC. The DMF was removed under a stream of nitrogen and the reaction mixture was separated by PTLC in MeOH:CH₂Cl₂:TEA (15:85:0.001). The chloroacetamide rhodamine was then eluted in MeOH:CH₂Cl₂ (15:85), concentrated under reduced pressure and redissolved in acetone (500 μL). NaI (150 mg, 1 mmol, 10 equiv.) was added to this and the reaction was stirred for 20 min at 50° C. until complete conversion to product was detected and the crude reaction mixture was purified by reverse phase HPLC on a C18 column and concentrated to yield the title compound as a purple solid that is a mixture of 5 and 6 carboxamide tetramethylrhodamine isomers (ratio˜6:1) (10 mg, 12%). ¹H NMR (600 MHz, Methanol-d₄) δ 8.87 (t, J=4.8 Hz, 0.14H), 8.80-8.71 (m, 1H), 8.41 (dd, J=8.2, 1.1 Hz, 0.86H), 8.35 (br s, 1H), 8.27 (dt, J=7.9, 1.5 Hz, 0.164H), 8.20 (dt, J=8.2, 1.5 Hz, 0.86H), 7.81 (s, 0.86H), 7.53 (d, J=7.8 Hz, 0.14H), 7.18-7.11 (m, 2H), 7.07 (d, J=9.5 Hz, 2H), 7.00 (s, 2H), 3.68-3.62 (m, 2H), 3.46-3.37 (m, 2H), 3.31 (s, 12H, obscured by solvent) 3.21-3.12 (m, 2H), 1.81-1.21 (m, 6H); HRMS-ESI (m/z) calculated for C₃₂H₃₆N40₅ [M+H]: 683.1725; found: 683.1716.

### N-(3,5-bis(trifluoromethyl)phenyl)acetamide (17)

[chemical structure]

[0451] Following General Procedure A, starting with 3,5-bis(trifluoromethyl)aniline (327 mg, 1.42 mmol, 1 equiv.) and acetic anhydride (200 μL, 3 mmol, 2 equiv.), the title compound was obtained after PTLC as a white solid (302 mg, 78%). ¹H NMR (500 MHz, Chloroform-d) δ 8.10 (s, 2H), 7.72 (s, 1H), 7.68 (s, 1H), 2.32 (d, J=0.9 Hz, 3H). HRMS-ESI (m/z) calculated for C₁₁H₈F₆NO₂ [M+H]: 284.0505; found: 284.0504.

### Synthesis of 18 and 19

[chemical structure]

### 3-amino-N-(hex-5-yn-1-yl)-5-(trifluoromethyl)benzamide (SI-5)

[chemical structure]

[0454] To a solution of 3-amino-5-(trifluoromethyl)benzoic acid (74 mg, 0.36 mmol) in acetonitrile (3.6 mL, 0.1 M final) was added EDCI (83 mg, 1.2 equiv.) followed by hex-5-ynamine (35 mg, 1.0 equiv.) followed by 1-hydroxybenzotriazole hydrate (HOBt, 66.3 mg, 1.2 equiv.) and the resulting solution was stirred overnight. The reaction was diluted with ethyl acetate, washed with 1 M HCl twice and then brine. The organic layer was dried over magnesium sulfate and concentrated to yield aniline SI-5 (97.4 mg, 95%) as a white solid. ¹H NMR (400 MHz, Chloroform-d) δ 7.29-7.22 (m, 2H), 6.98 (t, J=1.8 Hz, 1H), 6.38 (t, J=5.5 Hz, 1H), 4.08 (s, 2H), 3.46 (td, J=7.1, 5.7 Hz, 2H), 2.25 (td, J=6.9, 2.6 Hz, 2H), 1.99 (t, J=2.7 Hz, 1H), 1.81-1.55 (m, 4H).

### 3-acrylamido-N-(hex-5-yn-1-yl)-5-(trifluoromethyl)benzamide (18)

[chemical structure]

[0456] Following General Procedure B, starting with SI-5 (42 mg, 0.15 mmol, 1 equiv.), the title compound was obtained after column chromatography as a white solid (34 mg, 70%). ¹H NMR (500 MHz, Chloroform-d) δ 8.94 (s, 1H), 8.24 (d, J=11.9 Hz, 2H), 7.71 (s, 1H), 6.87 (t, J=5.7 Hz, 1H), 6.55 (dd, J=17.4, 0.7 Hz, 1H), 6.43 (dd, J=16.9, 10.1 Hz, 1H), 5.88 (dd, J=10.1, 1.3 Hz, 1H), 3.56 (q, J=6.7 Hz, 2H), 2.33 (td, J=6.9, 2.7 Hz, 2H), 2.06 (t, J=2.7 Hz, 1H), 1.87 (p, J=7.3 Hz, 2H), 1.69 (p, J=7.8 Hz, 2H); HRMS-ESI (m/z) calculated for C₁₇H₁₈F₃N₂O₂ [M+H]: 339.1314; found 339.1313.

### 3-acrylamido-N-(hex-5-yn-1-y)-5-(trifluoromethyl)benzamide (19)

[chemical structure]

[0458] Synthesized according to General Procedure A2, starting from SI-5. ¹H NMR (600 MHz, Chloroform-d) δ 8.57 (s, 1H), 8.16 (t, J=1.8 Hz, 1H), 8.05 (t, J=1.8 Hz, 1H), 7.79 (d, J=2.0 Hz, 1H), 6.38 (d, J=6.1 Hz, 1H), 4.23 (s, 2H), 3.51 (td, J=7.1, 5.7 Hz, 2H), 2.27 (td, J=6.9, 2.7 Hz, 2H), 2.00 (t, J=2.6 Hz, 1H), 1.82-1.74 (m, 2H), 1.71-1.59 (m, 2H); HRMS-ESI (m/z) calculated for C₁₆H₁₇ClF₃N₂O₂ [M+H]: 361.0925; found: 361.0925.

### 2-chloro-1-(4-(hydroxydiphenylmethyl)piperidin-1-yl)ethan-1-one (20)

[chemical structure]

[0460] Following General Procedure A, starting with α,α-diphenyl-4-piperidinemethanol (800 mg, 3 mmol, 1 equiv.), the title compound was obtained after column chromatography as a white solid (637 mg, 61%). ¹H NMR (500 MHz, Chloroform-d) δ 7.56 (d, J=7.6 Hz, 4H), 7.39 (q, J=7.1 Hz, 4H), 7.28 (q, J=6.8 Hz, 2H), 4.66 (d, J=13.3 Hz, 1H), 4.07 (dd, J=12.2, 4.2 Hz, 2H), 3.91 (d, J=13.4 Hz, 1H), 3.18 (t, J=12.9 Hz, 1H), 2.77-2.62 (m, 3H), 1.67 (t, J=12.5 Hz, 2H), 1.56 (q, J=11.8 Hz, 1H), 1.44 (q, J=12.4, 11.8 Hz, 1H); HRMS-ESI (m/z) calculated for C₂₀H₂₃ClNO₂ [M+H]: 344.1412; found: 344.1412.

### (E)-3-(3,5-bis(trifluoromethyl)phenyl)-2-cyanoacrylamide (23)

[chemical structure]

[0462] 3,5-bis(trifluoromethyl)benzaldehyde (880 mg, 3.6 mmol, 1 equiv.) and 2-cyanoacetamide (460 mg, 5.5 mmol, 1.5 equiv.) were dissolved in MeOH (10 mL). To this was added piperidine (214 mg, 0.7 equiv.) and the reaction was stirred at room temperature for 30 minutes at which point starting material was consumed. After addition of an equivalent volume of water (10 mL), the precipitate was collected by filtration and washed with water/methanol (1:1) to yield the title compound as a white solid (534 mg, 47%). ¹H NMR (400 MHz, Acetone-d₆) δ 8.78 (s, 2H), 8.61 (s, 1H), 8.41 (s, 1H), 7.57 (s, 1H), 7.42 (s, 1H); HRMS-ESI (m/z) calculated for C₁₂H₇F6N₂O₂ [M+H]: 309.0457; found: 309.0459.

### N-(3,5-bis(trifluoromethyl)phenyl)-2-bromopropanamide (24)

[chemical structure]

[0464] Following General Procedure A1, starting with 3,5-bis(trifluoromethyl)aniline (250 mg, 1.1 mmol, 1 equiv.) and 2-bromopropionyl chloride (200 j±L, 2 mmol, 1.8 equiv.) the title compound was obtained by PTLC as a white solid (130 mg, 35%). ¹H NMR (500 MHz, Chloroform-d) δ 8.34 (s, 1H), 8.06 (s, 2H), 7.66 (s, 1H), 4.58 (q, J=7.0 Hz, 1H), 1.98 (d, J=7.0 Hz, 3H); HRMS-ESI (m/z) calculated for C₁₁H₇BrF₆NO [M−H]: 361.9621; found: 361.9623.

### N-(3,5-bis(trifluoromethyl)phenyl)-2-chloropropanamide (25)

[chemical structure]

[0466] Following General Procedure A1, starting with 3,5-bis(trifluoromethyl)aniline (327 mg, 1.42 mmol, 1 equiv.) and 2-chloropropionyl chloride (200 μL, 2 mmol, 1.8 equiv.) the title compound was obtained by PTLC as a white solid (250 mg, 55%). ¹H NMR (500 MHz, Chloroform-d) δ 8.61 (s, 1H), 8.16 (s, 2H), 7.75 (s, 1H), 4.67 (q, J=7.1 Hz, 1H), 1.93 (d, J=7.1 Hz, 3H). HRMS-ESI (m/z) calculated for C₁₁H₇ClF₆NO [M−H]: 318.0126; found: 318.0126.

### N-(3,5-bis(trifluoromethyl)phenyl)-N-(pyridin-3-ylmethyl)acrylamide (31)

[chemical structure]

[0468] 3,5-bis(trifluoromethyl)aniline (350 mg, 1.6 mmol, 1 equiv.) was dissolved in TFA (5 mL). The reaction mixture was cooled to 0° C. and to this sodium triacetoxyborohydride (STAB) (400 mg, 2 mmol, 1.3 equiv.) was added. 3-pyridinecarboxaldehyde (244 mg, 1.5 mmol, 1 equiv.) was dissolved in CH₂Cl₂ (5 mL) and slowly added to the reaction mixture dropwise over 10 minutes. Upon complete conversion to product, the reaction mixture was diluted with CH₂Cl₂ (20 mL) and washed with saturated sodium bicarbonate solution (3×20 mL) and the organic layer was dried then concentrated under reduced pressure. Without further purification the crude material was dissolved in anhydrous CH₂Cl₂ and subjected to General Procedure B. The resulting crude was purified by PTLC to give a white solid (10 mg, 2%). ¹H NMR (500 MHz, Chloroform-d) δ 8.63 (d, J=3.8 Hz, 1H), 8.49 (s, 1H), 7.93 (s, 1H), 7.70 (d, J=7.7 Hz, 1H), 7.55 (s, 2H), 7.35 (dd, J=7.6, 5.3 Hz, 1H), 6.60 (dd, J=16.6, 1.6 Hz, 1H), 6.02 (dd, J=16.9, 10.2 Hz, 1H), 5.79 (dd, J=10.3, 1.6 Hz, 1H), 5.11 (s, 2H). HRMS-ESI (m/z) calculated for C₁₇H₁₃F₆N₂O [M+H]: 375.0927; found: 375.0928.

### 3-(2-chloroacetamido)-5-(trifluoromethyl)benzoic acid (36)

[chemical structure]

[0470] To a solution of 3-amino-5-(trifluoromethyl)benzoic acid (500 mg, 2.44 mmol) in 1.5 mL of dimethylacetamide (1.6 M) at 0° C. was added chloroacetyl chloride (214 μL, 2.69 mmol, 1.1 equiv.). The resulting solution was warmed to ambient temperature and stirred for 20 minutes, at which point ethyl acetate (40 mL) and water (30 mL) were added. The pH of the aqueous layer was adjusted to pH 10 via addition of 1 N NaOH, and the phases were separated. The aqueous layer was washed with 40 mL of ethyl acetate, then acidified by adding 1 N HCl. The product was extracted with ethyl acetate (40 mL), and the organic layer was washed with 1M HCl (2×40 mL), brine (40 mL), dried over magnesium sulfate and concentrated to provide the desired product (456 mg, 66%). ¹H NMR (500 MHz, Chloroform-d) δ 8.31 (s, 1H), 8.27 (s, 1H), 8.14 (s, 1H), 4.13 (s, 2H); HRMS-ESI (m/z) calculated for C₁₀H₈ClF₃NO₃ [M+H]: 282.0139; found: 282.0141.

### 1-(4-(5-fluorobenzisoxazol-3-yl)piperidin-1-yl)prop-2-en-1-one (37)

[chemical structure]

[0472] The title compound was obtained starting from 6-fluoro-3(4-piperidinyl)-1,2-benzisoxazole hydrochloride (53 mg, 0.2 mmol, 1 equiv.) according to General Procedure C as a colorless oil (49.1 mg, 87%). ¹H NMR (400 MHz, Chloroform-d) δ 7.64 (dd, J=8.7, 5.1 Hz, 1H), 7.27 (dd, J=8.4, 2.3 Hz, 1H), 7.08 (td, J=8.9, 2.1 Hz, 1H), 6.64 (dd, J=16.8, 10.6 Hz, 1H), 6.32 (dd, J=16.9, 1.9 Hz, 11H), 5.73 (dd, J=10.6, 1.9 Hz, 1H), 4.70 (d, J=13.4 Hz, 1H), 4.15 (d, J=12.4 Hz, 1H), 3.53-3.13 (m, 2H), 2.99 (t, J=13.1 Hz, 1H), 2.25-2.07 (m, 2H), 2.00 (ddd, J=23.1, 14.2, 7.8 Hz, 211); HRMS-ESI (m/z) calculated for C₁₅H₁₆FN₂O [M+H]: 275.119; found: 275.119.

### tert-butyl 4-(4-acrylamido-2,6-difluorophenyl)piperazine-1-carboxylate (38)

[chemical structure]

[0474] The title compound was obtained starting from tert-Butyl 4-(4-amino-2,6-difluorophenyl)piperazine-1-carboxylate according to General Procedure B. ¹H NMR (400 MHz, Chloroform-d) δ 8.12 (s, 1H), 7.13 (d, J=10.4 Hz, 2H), 6.36 (d, J=16.9 Hz, 1H), 6.19 (dd, J=16.8, 10.2 Hz, 1H), 5.70 (d, J=10.2 Hz, 1H), 3.45 (t, J=4.7 Hz, 4H), 3.00 (t, J=3.7 Hz, 4H), 1.41 (s, 9H); HRMS-ESI (m/z) calculated for C₁₈H₂₄F₂N₃O₃ [M+H]: 368.178; found: 368.178.

### N-(4-bromo-2,5-dimethylphenyl)acrylamide (40)

[chemical structure]

[0476] Following General Procedure B, starting from 4-bromo-2,5-dimethylaniline (900 mg, 4.5 mmol, 1 equiv.), the title compound was obtained after column chromatography and recrystallization from cold CH₂Cl₂ as a white solid (611 mg, 40%). ¹H NMR (500 MHz, Chloroform-d) δ 7.87 (s, 1H), 7.43 (s, 1H), 7.16 (s, 1H), 6.50 (d, J=16.7 Hz, 1H), 6.35 (dd, J=16.4, 10.3 Hz, 1H), 5.86 (d, J=10.3 Hz, 1H), 2.42 (s, 3H), 2.28 (s, 3H); HRMS-ESI (m/z) calculated for C₁₁H₁₃BrNO [M+H]: 254.0175; found: 254.0175.

### 2-Chloroacetamido-2-deoxy-α/β-D-glucopyranose (44)

[chemical structure]

[0478] To a stirred solution of hexosamine hydrochloride (590 mg, 3.39 mmol, 1 equiv.) in anhydrous MeOH (200 mL) at room temperature was added sodium metal (60 mg, 2.6 mmol, 0.78 equiv.), TEA (400 μL, 5.7 mmol, 1.8 equiv.). Chloroacetic anhydride (1 g, 5.9 mmol, 1 equiv.) was then added and the mixture stirred for 6 h, monitoring for completeness by TLC. After which, the reaction mixture was concentrated in vacuo. The crude product then was purified by two rounds of column chromatography to afford the pure title product as a white solid (610 mg, 72%). ¹H NMR (500 MHz, Methanol-d₄) δ 5.20 (d, J=3.7 Hz, 1Hα), 4.75 (d, J=8.3 Hz, 1H3), 4.19 (dd, J=20.2, 13.9 Hz, 2H), 4.19 (d, J=12.6 Hz, 1H), 3.95 (dd, J=10.6, 3.5 Hz, 1Hα), 3.83 (m, 3Hα, 3HP), 3.74 (d, J=5.1 Hz, 1Hβ), 3.70 (dd, J=11.4, 8.9 Hz, 1Hβ), 3.60 (dd, J=10.7, 9.5 Hz, 1Hβ), 3.46 (t, J=9.3 Hz, 1H), 3.42 (t, J=10.0 Hz, 1H); HRMS-ESI (m/z) calculated for C₈H₁₅ClNO₆ [M+H]: 256.0582; found: 256.0582.

### 2-chloro-1-(2-methyl-3,4-dihydroquinolin-1 (2H)-yl)ethan-1-one (45)

[chemical structure]

[0480] Chloroacetyl chloride (80.4 μL, 0.9 mmol, 1.7 equiv.) was dissolved in anhydrous CH₂Cl₂ (3 mL) and cooled to 0° C. A solution of 2-methyl-1,2,3,4-tetrahydroquinoline (80.1 mg, 0.544 mmol, 1 equiv.) and N-methylmorpholine (0.11 mL, 1.0 mmol, 1.8 equiv.) in CH₂Cl₂ (2 mL) was then added dropwise. After 6 h, the reaction was quenched with saturated aqueous NaHCO₃ (5 mL) and extracted with CH₂Cl₂ (3×10 mL). The combined organic layers were dried over anhydrous Na₂SO₄ and concentrated under reduced pressure. The resultant residue was purified by prep. TLC (30% EtOAc/hexanes), providing the title compound as an off-white solid (108.8 mg, 89%). ¹H NMR (400 MHz, chloroform-d) δ 7.30-7.13 (m, 4H), 4.86-4.75 (m, 1H), 4.20 (d, J=12.5 Hz, 1H), 4.09 (d, J=12.5 Hz, 1H), 2.69-2.58 (m, 1H), 2.59-2.46 (m, 1H), 2.46-2.31 (m, 1H), 1.36-1.29 (m, 1H), 1.15 (d, J=6.5 Hz, 3H); HRMS-ESI (m/z) calculated for C₂H₁₅ClNO [M+H]: 224.0837; found: 224.0836.

### N-cyclohexyl-N-phenylacrylamide (46)

[chemical structure]

[0482] The title compound was synthesized according to General Procedure C from N-cyclohexylaniline (89.5 mg, 0.511 mmol, 1 equiv.). Purification of the crude product by flash column chromatography (10-20% EtOAc/hexanes) then prep. TLC (30% EtOAc/hexanes) provided the title compound as an off-white solid (53.1 mg, 45%). ¹H NMR (400 MHz, chloroform-d) δ 7.42-7.33 (m, 3H), 7.10-7.06 (m, 2H), 6.31 (dd, J=16.7, 2.1 Hz, 1H), 5.77 (dd, J=16.7, 10.3 Hz, 1H), 5.41 (dd, J=10.4, 2.1 Hz, 1H), 4.65 (tt, J=12.2, 3.7 Hz, 1H), 1.85 (dt, J=11.2, 1.8 Hz, 2H), 1.75-1.68 (m, 2H), 1.61-1.53 (m, 1H), 1.40 (qt, J=13.3, 3.6 Hz, 2H), 1.07 (qd, J=12.4, 3.6 Hz, 2H), 0.91 (qt, J=13.1, 3.8 Hz, 1H); HRMS-ESI (m/z) calculated for C₁₅H₂₀NO [M+H]: 230.1539; found: 230.1539.

### 1-(5-bromoindolin-1-yl)prop-2-en-1-one (47)

[chemical structure]

[0484] The title compound was synthesized according to General Procedure C from 5-bromoindoline (41.7 mg, 0.211 mmol, 1 equiv.), acryloyl chloride (32 μL, 0.40 mmol, 1.9 equiv.), and changing the base to pyridine (32 μL, 0.40 mmol, 1.9 equiv.). Purification of the crude product by re-precipitation from EtOAc provided the title compound as a white solid (67.8 mg, 64%). ¹H NMR (400 MHz, chloroform-d) δ 8.16 (d, J=8.6 Hz, 1H), 7.33-7.25 (m, 2H), 6.60-6.42 (m, 211), 5.84-5.76 (m, 1H), 4.15 (t, J=8.6 Hz, 2H), 3.17 (t, J=8.6 Hz, 2H); HRMS-ESI (m/z) calculated for C₁₁H₁₁BrNO [M+H]: 252.0018; found: 252.0017.

### N-(1-benzylpiperidin-4-yl)-N-phenylacrylamide (48)

[chemical structure]

[0486] The title compound was synthesized according to General Procedure C from 1-benzyl-N-phenylpiperidin-4-amine (30.0 mg, 0.113 mmol, 1 equiv.), acryloyl chloride (17 μL, 0.21 mmol, 1.9 equiv.), and changing the base to pyridine (17 μL, 0.21 mmol, 1.9 equiv.). Purification of the crude product by prep. TLC provided the title compound as a white solid (22.5 mg, 64%). ¹H NMR (400 MHz, chloroform-d) δ 7.62-7.56 (m, 2H), 7.43-7.36 (m, 6H), 7.05 (d, J=6.2 Hz, 2H), 6.29 (dd, J=16.8, 2.1 Hz, 1H), 5.79 (dd, J=16.8, 10.3 Hz, 1H), 5.46 (dd, J=10.3, 2.1 Hz, 1H), 4.81-4.70 (m, 1H), 4.09 (s, 2H), 3.41 (d, J=12.0 Hz, 2H), 2.82 (q, J=11.5 Hz, 2H), 2.21 (q, J=11.9 Hz, 2H), 1.94 (d, J=14.2 Hz, 2H); HRMS-ESI (m/z) calculated for C₂₁H₂₅N₂O [M+H]: 321.1961; found: 321.1962.

### 2-chloro-N-(2-methyl-5-(trifluoromethyl)phenyl)acetamide (49)

[chemical structure]

[0488] The title compound was synthesized according to General Procedure A1 from 2-methyl-5-(trifluoromethyl)aniline (35.0 mg, 0.2 mmol, 1 equiv.). Purification of the crude product by prep. TLC (20% EtOAc/hexanes) provided the title compound as a white solid (48.2 mg, 95%). ¹H NMR (600 MHz, chloroform-d) δ 8.31 (s, 1H), 8.25 (d, J=1.9 Hz, 1H), 7.37 (dd, J=7.9, 1.8 Hz, 1H), 7.32 (d, J=7.9 Hz, 1H), 4.25 (s, 2H1), 2.36 (s, 3H); HRMS-ESI calculated for C₁₀H₁₀ClF₃NO [M+H]: 252.0397; found: 252.0397.

### 1-(5-bromoindolin-1-yl)-2-chloroethan-1-one (50)

[chemical structure]

[0490] The title compound was synthesized according to General Procedure A1 from 5-bromoindoline (39.6 mg, 0.2 mmol, 1 equiv.). Purification of the crude product by prep. TLC (25% EtOAc/hexanes) provided the title compound as an off-white solid (48.6 mg, 89%). ¹H NMR (600 MHz, CDCl₃) δ 8.07 (d, J=8.4 Hz, 1H), 7.32 (d, J=8.8 Hz, 2H), 4.17 (t, J=8.6 Hz, 2H), 4.14 (s, 2H), 3.22 (t, J=8.4 Hz, 2H); HRMS-ESI (m/z) calculated for C₁₀H₁₀BrClNO [M+H]: 273.9629; found: 273.9629.

### 2-chloro-N-(quinolin-5-yl)acetamide (51)

[chemical structure]

[0492] To a stirring suspension of 5-aminoquinoline (28.8 mg, 0.2 mmol, 1 equiv.) and potassium carbonate (82.9 mg, 0.6 mmol, 3 equiv.) in anhydrous CH₂Cl₂ (3 mL) at 0° C. was added chloroacetyl chloride (24 μL, 1.5 equiv.). The reaction was allowed to slowly warm up to room temperature. After 3 hours, the mixture was filtered, washed with EtOAc (10 mL) and CH₂Cl₂ (10 mL). The solid cake was then eluted with MeOH (20 mL) and the filtrate concentrated in vacuo. The residue was taken up in 10% MeOH/CH₂Cl₂ and passed through a pad of silica to provide the title compound as an off-white solid (42.6 mg, 82%). ¹H NMR (500 MHz, CDCl₃) δ 8.96 (d, J=2.5 Hz, 1H), 8.71 (s, 1H), 8.20 (d, J=8.6 Hz, 1H), 8.04 (d, J=8.5 Hz, 1H), 7.94 (d, J=7.5 Hz, 1H), 7.74 (t, J=8.0 Hz, 1H), 7.48 (dd, J=8.5, 4.2 Hz, 1H), 4.35 (s, 2H); HRMS-ESI (m/z) calculated for C₁₁H₉ClN₂O [M+H]: 221.0476; found: 221.0477.

### 1-(4-benzylpiperidin-1-yl)prop-2-en-1-one (53)

[chemical structure]

[0494] Following General Procedure B, starting from 4-benzylpiperidine (1 g, 5.7 mmol, 1 equiv.), the title compound was obtained after column chromatography as a yellow oil (748 mg, 57%). ¹H NMR (500 MHz, Chloroform-d) δ 7.36 (t, J=7.4 Hz, 2H), 7.28 (t, J=7.4 Hz, 1H), 7.20 (d, J=7.1 Hz, 2H), 6.64 (dd, J=16.8, 10.6 Hz, 1H), 6.32 (dd, J=16.8, 1.9 Hz, 1H), 5.72 (dd, J=10.6, 1.9 Hz, 1H), 4.72 (d, J=12.7 Hz, 1H), 4.03 (d, J=13.0 Hz, 1H), 3.05 (t, J=12.7 Hz, 1H), 2.70-2.59 (m, 3H), 1.86 (ddp, J=14.6, 7.2, 3.5 Hz, 1H), 1.77 (m, 2H), 1.37-1.18 (m, 2H); HRMS-ESI (m/z) calculated for C₁₅H₂₀ClNO [M+H]: 230.1539; found: 230.1539.

### 2-chloro-N-((3-hydroxy-5-(hydroxymethyl)-2-methylpyridin-4-yl)methyl)acetamide (54)

[chemical structure]

[0496] To a stirred solution of pyridoxamine hydrochloride (150 mg, 0.64 mmol, 1 equiv.) in anhydrous MeOH (20 mL) at room temperature was added sodium metal (30 mg, 1.5 mmol, 2.3 equiv.), TEA (100 μL, 1 mmol, 1.6 equiv.). Chloroacetic anhydride (390 mg, 2.29 mmol, 3.5 equiv.) was added and the mixture stirred for 6 h, monitoring for completeness by TLC. After which, the reaction mixture was concentrated in vacuo. The crude product then was the purified by prep. TLC to afford the title compound as a white solid (46 mg, 30%). ¹H NMR (500 MHz, Methanol-d₄) δ 7.97 (s, 1H), 4.81 (s, 2H), 4.61 (s, 2H), 4.17 (s, 3H), 4.06 (s, 1H), 3.35 (s, 1H), 2.52 (s, 3H); HRMS-ESI (m/z) calculated for C₁₀H₁₄ClN₂O₃ [M+H]: 245.0687; found: 245.0688.

### 1-(6,7-dimethoxy-3,4-dihydroisoquinolin-2(1H)-yl)prop-2-en-1-one (56)

[chemical structure]

[0498] To a stirring suspension of the 6,7-dimethoxy-3,4-dihydroisoquinoline (1 g, 5.2 mmol, 1 equiv.) and TEA (1800 μL, 12.6 mmol, 2.5 equiv.) in anhydrous THF (10 mL) at 0° C. was added acryloyl chloride (1320 μL, 13.2 mmol, 2.6 equiv.) and the reaction was allowed to slowly warm up to room temperature. After 2 hours, the mixture was diluted with CH₂Cl₂ (2×50 mL) and washed with saturated brine (2×50 mL) and the combined organics were concentrated in vacuo. The residue was taken up in 10% MeOH/CH₂Cl₂ and purified by column chromatography to afford the title compound as a white solid (700 mg, 54%, mixture of E/Z isomers). ¹H NMR (500 MHz, Chloroform-d) δ 6.63 (m, 3H), 6.29 (d, J=16.8 Hz, 1H), 5.69 (dd, J=10.6, 1.8 Hz, 1H), 4.69 (s, 1H [major]), 4.63 (s, 0.8H [minor]), 3.82 (s, 7H), 3.73 (t, J=5.6 Hz, 1H), 2.84-2.77 (m, 2H); HRMS-ESI (m/z) calculated for C₁₄H₁₈NO₃ [M+H]: 248.128; found: 248.1281.

### 2-chloro-N-(1-(3-ethynylbenzyl)piperidin-4-yl)-N-phenylacetamide (61)

[chemical structure]

[0500] To an excess of neat SI-3 was added 0.7 mL of trifluoroacetic acid (0.2 M). The resulting solution was concentrated under a stream of nitrogen until no further evaporation was observed, providing the deprotected amine as its trifluoroacetate salt. The trifluoroacetate amine salt (90.6 mg, 0.25 mmol) was taken up in DMF (0.5 mL, 0.5 M) and the resulting solution was cooled to 0° C. 3-ethynyl benzoic acid (44 mg, 1.2 equiv.), HATU (113 mg, 1.2 equiv.), and Hunig's base (86 μL, 2 equiv.) were sequentially added. The reaction was stirred for 2 hours at 0° C., diluted with Et₂O, and then washed with 1 M HCl. The organic layer was dried over magnesium sulfate, concentrated, and purified by flash chromatography (gradient from 40 to 70% ethyl acetate in hexanes) to provide the title compound (87 mg, 92%). ¹H NMR (400 MHz, Chloroform-d) δ 7.51 (dd, J=9.5, 5.4 Hz, 4H), 7.43 (d, J=1.9 Hz, 1H), 7.39-7.25 (m, 2H), 7.14 (d, J=10.4 Hz, 2H), 4.86 (tt, J=15.1, 5.3 Hz, 2H), 3.72 (s, 3H), 3.19 (d, J=14.0 Hz, 1H), 3.11 (s, 1H), 2.86 (s, 1H), 1.90 (d, J=36.6 Hz, 2H), 1.38 (s, 1H), 1.24 (d, J=19.9 Hz, 1H); HRMS-ESI (m/z) calculated for C₂₂H₂₂C1N₂O₂ [M+H]: 381.1364; found: 381.1363.

### Example 2

[0501] Animal Treatment

[0502] Female DBA/1 mice (7-10 week of age) are purchased from The Jackson Laboratory (Bar Harbor, Me.), and are kept for 1 week before treatments. The animal facilities are certified by the Association for Assessment and Accreditation of Laboratory Animal Care. An illustrative compound from FIG. 1, compound A, is used for this study. The animals are injected i.p. with about 50 mg/kg of compound A (dissolved in phosphate-buffered saline) or vehicle four times weekly for 3 weeks. Four days after the last dose, mice are scarified, and splenocytes and lymph node cells are isolated for ex vivo T-cell proliferation assays.

[0503] Lymph Node and Splenic T-Cell Proliferation Assay

[0504] Splenocytes and lymph node cells obtained from the Animal Treatment study are separately pooled from three to five mice, and single-cell suspension are prepared. The cells (about 1×10⁶ cells/well) are stimulated with 10 μg/ml of compound A, and then incubated for 4 days in a 96-well plate in DMEM containing 10% fetal calf serum (FCS). During the last 16 hours, the cells are pulsed with [³H]thymidine (0.5 μCi/well), and T-cell proliferation is determined by thymidine uptake. In the lymph node proliferation assay, serum-free X-VIVO medium is used.

[0505] Electrophoresis Analysis

[0506] Splenocytes and lymph node cells obtained from the Animal Treatment study are separately pooled and centrifuged to collect the respective cell pellet. The cell pellet is subsequently lysed and resolved on a 10-12% polyacrylamide gel. Protein bands are subsequently visualized by silver staining.

### Example 3

[0507] Tumor Cell Lines and Mice

[0508] Six to eight-week female C57BL and C3H mice are purchased (Charles River Laboratories, Wilmington, Mass.). The animal facilities are certified by the Association for Assessment and Accreditation of Laboratory Animal Care.

[0509] ID8 is a clone of the MOSEC ovarian carcinoma of C57BL/6 origin. SW1 is a clone derived from the K1735 melanoma of C3H origin.

[0510] In Vivo Studies

[0511] In experiments with the ID8 ovarian carcinoma, mice (5 or 10/group) are transplanted i.p. with 3×10⁶ cells. Either 10 or 15 days later, they are injected i.p. with compound A or vehicle, which is repeated weekly for a total of 3 times. Mice are monitored daily for tumor growth, including swollen bellies indicating that they have developed ascites, and for evidence of toxicity. Tumor growth is recorded using a digital caliper. The survival of each mouse is further recorded and overall survival is calculated as mean±standard error of mean (M±SEM).

[0512] In experiments with the SW1 melanoma, 5×10⁵ cells are transplanted s.c. on the right flank, When the mice have developed tumors of about 4-5 mm in mean diameter, they are randomized into treatment group and control group; with either compound A or vehicle injected i.p., respectively, at weekly intervals for a total of 3 times. Mice are monitored daily for evidence of toxicity. Tumor diameters are measured twice/week using a digital caliper and tumor surfaces are calculated. Overall survival is also recorded.

### Example 4

[0513] Phase 1 Clinical Trial

[0514] Purpose: this clinical trial is to assess the safety and tolerability of administration of compound A in combination with low-dose cytokines (IL-2 and IFN-alpha) in patients with metastatic or refractory cancer.

[0515] Study Type: Interventional

[0516] Study Design: Allocation: Non-Randomized

[0517] Intervention Model: Single Group Assignment

[0518] Masking: Open Label

[0519] Primary Purpose: Treatment

[0520] Primary Outcome Measures:
[0521] Safety [Time Frame: Initial dose of study therapy through 30 days post last dose of study therapy]
[0522] Tolerability [Time Frame: Initial dose of study therapy through 30 days post last dose of study therapy]
[0523] Anti-tumor Activity [Time Frame: From initial dose of study therapy to disease progression]

[0524] Eligibility

[0525] Ages Eligible for Study: 18 Years and older (Adult, Senior)

[0526] Sexes Eligible for Study: All

[0527] Accepts Healthy Volunteers: No

[0528] Criteria

[0529] Inclusion Criteria:
[0530] Have a histologically confirmed diagnosis of metastatic or refractory cancer for which there are no effective standard therapeutic options available;
[0531] Have signed an Institutional Review Board (IRB) approved informed consent form (ICF) prior to performing any study evaluation/procedures;
[0532] Be > or =18 years of age and women must either be 1) not of childbearing potential or 2) have a negative serum pregnancy test within 7 days prior to commencing treatment. Patients are considered not of childbearing potential if they are surgically sterile (they have undergone a hysterectomy, bilateral tubal ligation or bilateral oophorectomy) or they are postmenopausal (12 consecutive months of amenorrhea [lack of menstruation]);
[0533] (If applicable) Have completed prior cytotoxic chemotherapy, radiotherapy or immunotherapy or experimental therapy > or =30 days prior to the study enrollment, and recovered form associated toxicities;
[0534] Have an Eastern Cooperative Oncology Group (ECOG) score of < or =2, and an anticipated life expectancy of at least 6 months;
[0535] Have adequate hematologic function, as defined by an absolute or calculated neutrophil count > or =1500/microL, platelet count > or =100000/microL, lymphocyte count > or =500/microL, and hemoglobin level > or =10 g/dL. Patients may not receive prophylactic transfusion in order to qualify for trial eligibility;
[0536] Have adequate renal function, as defined by a documented serum creatinine of < or =2.0 mg/dL. Greater than “1+” proteinuria will require microscope evaluation and the results discussed with the medical monitor prior to patient enrollment; or if serum creatine is >2.0, patient must have an actual or calculated 24-hour creatinine clearance of >60 mL/min and no obvious evidence of concurrent medullary cystic disease or obstructive uropathy;
[0537] Have adequate hepatic function, as defined by a total bilirubin level < or =1.5× upper limit of normal (ULN) and alkaline phosphatase, aspartate transaminase (AST), and alanine transaminase (ALT) levels < or =2.5×ULN. If alkaline phosphatase is outside of these parameters and is due to bone metastases (as verified by the assessment of isoenzymes), then the patient is eligible.

[0538] Exclusion Criteria:
[0539] Have a history of severe hypersensitivity (grade 3-4 allergic reaction) to fluorescein or any drug, radiologic contrast agent, insect bite, food, cytokines, or any other agent; or have received fluorescein within 30 days of the study;
[0540] Have medical conditions that preclude the use of IL-2 or IFN-alpha. These conditions include but are not limited to, diabetes mellitus with a history of progression to diabetic ketoacidosis, history of severe coagulation disorder, psoriasis, sarcoidosis, retinal hemorrhage, symptomatic pulmonary disease, heart failure (> or =New York Heart Association NYHA class II), or transplant requiring immunosuppressive therapy;
[0541] Be pregnant or breast-feeding;
[0542] Be currently receiving an experimental drug, or used an experimental device within 30 days of study entry;
[0543] Be currently undergoing chemotherapy, anticancer hormonal therapy, and/or therapy with immunosuppressant agents;
[0544] Have any concomitant malignancy with the exception of basal cell or squamous cell carcinoma of skin;
[0545] Have radiographically documented evidence of current brain metastases, a history of stem cell transplant, immunodeficiency, and/or a medical or psychiatric illness (that in the investigator's opinion, would prevent adequate compliance with study therapy or evaluation of the endpoints).

### Example 5

[0546] Tables 1-5 illustrate exemplary lists of cysteine-containing polypeptides.

[0547] Table 1 illustrates an exemplary list of liganded cysteines which are identified from isoTOP-ABPP experiments performed in cell lysates (in vitro). Table 1 further shows the accession number (or the protein identifier) of the protein, cysteine residue number, and an illustrative peptide fragment containing the cysteine of interest (denoted by C*). For example, P23396 (row 2, col 1) is the accession number (or protein identifier) of RPS3 40S ribosomal protein S3. C97 (row 2, col 1) is the cysteine residue number of interest. The peptide fragment: R.GLC*AIAQAESLR.Y (SEQ ID NO: 1) is an illustrative peptide fragment of RPS3 40S ribosomal protein S3 containing the cysteine residue C97 and is denoted by C*.

TABLE 1

| | | | SEQ ID |
|---|---|---|---|
| Identifier | Protein Name | Illustrative Cysteine Fragment | NO: |
| P23396_ | RPS3 40S ribosomal protein S3 | R.GLC*AIAQAESLR.Y | 1 |
| C97 | | | |
| P68366_ | TUBA4A Tubulin alpha-4A chain | K.AYHEQLSVAEITNAC*FEPANQMVK.C | 2 |
| C295 | | | |
| P68366_ | TUBA4A Tubulin alpha-4A chain | K.RSIQFVDWC*PTGFK.V | 3 |
| C347 | | | |
| Q71U36_ | TUBA1A Tubulin alpha-1A chain | K.RTIQFVDWC*PTGFK.V | 4 |
| C347 | | | |
| Q71U36_ | TUBA1A Tubulin alpha-1A chain | R.AVC*MLSNTTAIAEAWAR.L | 5 |
| C376 | | | |
| Q7L1Q6_ | BZW1 Basic leucine zipper and W2 | K.ERFDPTQFQDC*IIQGLTETGTDLEAVAK. | 6 |
| C35 | domain-containing protein | F | |
| P04406_ | GAPDH Glyceraldehyde-3-phosphate | K.IISNASC*TTNCLAPLAK.V | 7 |
| C152 | dehydrogenase | | |
| Q99873_ | PRMT1 Protein arginine N- | K.VIGIEC*SSISDYAVK.I | 8 |
| C109 | methyltransferase 1 | | |
| Q15365_ | PCBP1 Poly(rC)-binding protein 1 | R.LVVPATQC*GSLIGK.G | 9 |
| C109 | | | |
| Q13526_ | PIN1 Peptidyl-prolyl cis-trans | K.IKSGEEDFESLASQFSDC*SSAK.A | 10 |
| C113 | isomerase NIMA-interacting 1 | | |
| Q9Y266_ | NUDC Nuclear migration protein | R.WTQTLSELDLAVPFC*VNFR.L | 11 |
| C188 | nudC | | |
| Q9Y696_ | CLIC4 Chloride intracellular channel | K.AGSDGESIGNC*PFSQR.L | 12 |
| C35 | protein 4 | | |
| P24752_ | ACAT1 Acetyl-CoA | R.QAVLGAGLPISTPC*TTINK.V | 13 |
| C119 | acetyltransferase, mitochondrial | | |
| P10809_ | HSPD1 60 kDa heat shock protein, | R.AAVEEGIVLGGGC*ALLR.C | 14 |
| C442 | mitochondrial | | |
| P68366_ | TUBA4A Tubulin alpha-4A chain | K.YMAC*CLLYR.G | 15 |
| C315 | | | |
| P09211_ | GSTP1 Glutathione S-transferase P | K.ASC*LYGQLPK.F | 16 |
| C48 | | | |
| Q86SX6_ | GLRX5 Glutaredoxin-related protein | K.GTPEQPQC*GFSNAVVQILR.L | 17 |
| C67 | 5, mitochondrial | | |
| P13639_ | EEF2 Elongation factor 2 | K.STLTDSLVC*K.A | 18 |
| C41 | | | |
| O14980_ | XPO1 Exportin-1 | K.LDINLLDNVVNC*LYHGEGAQQR.M | 19 |
| C34 | | | |
| Q15365_ | PCBP1 Poly(rC)-binding protein 1 | R.VMTIPYQPMPASSPVIC*AGGQDR.C | 20 |
| C194 | | | |
| Q99832_ | CCT7 T-complex protein 1 subunit eta | K.EGTDSSQGIPQLVSNISAC*QVIAEAVR.T | 21 |
| C29 | | | |
| P62280_ | RPS11 40S ribosomal protein S11l | K.C*PFTGNVSIR.G | 22 |
| C60 | | | |
| P78417_ | GSTO1 Glutathione S-transferase | R.FC*PFAER.T | 23 |
| C32 | omega-1 | | |
| P24752_ | ACAT1 Acetyl-CoA | K.IHMGSC*AENTAK.K | 24 |
| C196 | acetyltransferase, mitochondrial | | |
| P10599_ | TXN Thioredoxin | K.LVVVDFSATWC*GPCK.M | 25 |
| C32 | | | |
| P50990_ | CCT8 T-complex protein 1 subunit | KIAVYSC*PFDGMITETK.G | 26 |
| C244 | theta | | |
| P13667_ | PDIA4 Protein disulfide-isomerase A4 | K.ENFDEVVNDADIILVEFYAPWC*GHCK.K | 27 |
| C206 | | | |
| P55735_ | SEC13 Protein SEC13 homolog | R.FASGGC*DNLIK.L | 28 |
| C187 | | | |
| Q15185_ | PTGES3 Prostaglandin E synthase 3 | K.HLNEIDLFHC*IDPNDSK.H | 29 |
| C58 | | | |
| P55263_ | ADK Adenosine kinase | R.TGC*TFPEKPDFH | 30 |
| C353 | | | |
| P46782_ | RPS5 40S ribosomal protein S5 | K.AQC*PIVER.L | 31 |
| C66 | | | |
| Q99439_ | CNN2 Calponin-2 | K.AGQC*VIGLQMGTNK.C | 32 |
| C164 | | | |
| P13639_ | EEF2 Elongation factor 2 | R.VTDGALVVVDCVSGVC*VQTETVLR.Q | 33 |
| C136 | | | |
| Q2TAA2_ | IAH1 Isoamyl acetate-hydrolyzing | R.VILITPTPLC*ETAWEEQCIIQGCK.L | 34 |
| C137 | esterase 1 homolog | | |
| P30044_ | PRDX5 Peroxiredoxin-5, | K.ALNVEPDGTGLTC*SLAPNIISQL | 35 |
| C204 | mitochondrial | | |
| P12268_ | IMPDH2 Inosine-5-monophosphate | R.HGFC*GIPITDTGR.M | 36 |
| C140 | dehydrogenase 2 | | |
| Q99714_ | HSD17810 3-hydroxyacyl-CoA | K.VC*NFLASQVPFPSR.L | 37 |
| C214 | dehydrogenase type-2 | | |
| Q9NQR4_ | NIT2 Omega-amidase NIT2 | R.VGLGIC*YDMR.F | 38 |
| C153 | | | |
| P15121_ | AICR1B1 Aldose reductase | R.VC*ALLSCTSHK.D | 39 |
| C299 | | | |
| Q6UB35_ | MTHFD1L Monofunctional C1 - | K.IDRYTQQGFGNLPIC*MAK.T | 40 |
| C906 | tetrahydrofolate synthase, | | |
| | mitochondrial | | |
| P07437_ | TUBB Tubulin beta chain | K.LTTPTYGDLNHLVSATMSGVTTC*LR.F | 41 |
| C239 | | | |
| Q15084_ | PDIA6 Protein disulfide-isomerase A6 | R.EVIQSDSLWLVEFYAPWC*GHCQR.L | 42 |
| C55 | | | |
| P14618_ | PKM Pyruvate kinase isozymes | K.C*CSGAIIVLTK.S | 43 |
| C423 | M1/M2 | | |
| P62266_ | RPS23 40S ribosomal protein S23 | K.ITAFVPNDGC*LNFIEENDEVLVAGFGR.K | 44 |
| C90 | | | |
| Q71U36_ | TUBA1A Tubulin alpha-1A chain | MRECISIHVGQAGVQIGNAC*WELYCLEHG | 45 |
| C20 | | IQPDGQMPSDK.T | |
| O95336_ | PGLS 6-phosphogluconolactonase | R.AAC*CLAGAR.A | 46 |
| C32 | | | |
| P24752_ | ACAT1 Acetyl-CoA | K.QGEYGLASIC*NGGGGASAMLIQK.L | 47 |
| C413 | acetyltransferase, mitochondrial | | |
| P62701_ | RPS4X 40S ribosomal protein S4, X | K.LREC*LPLIIFLR.N | 48 |
| C41 | isoform | | |
| P62829_ | RPL23 60S ribosomal protein L23 | R.ISLGLPVGAVINC*ADNTGAK.N | 49 |
| C28 | | | |
| Q71U36_ | TUBA1A Tubulin alpha-1A chain | R.ECISTHVGQAGVQIGNACWELYC*LEHGI | 50 |
| C25 | | QPDGQMPSDK.T | |
| Q96HE7_ | ERO1L ERO1-like alpha | K.HDDSSDNFC*EADDIQSPEAEYVDLLLNP | 51 |
| C166 | protein | ER.Y | |
| Q96HE7_ | ERO1L ERO1-like protein alpha | K.RPLNPLASGQGTSEENTFYSWLEGLC*VE | 52 |
| C241 | | K.R | |
| Q9BRA2_ | TXNDC17 Thioredoxin domain- | K.SWC*PDCVQAEPVVR.E | 53 |
| C43 | containing protein 17 | | |
| P13667_ | PDIA4 Protein disulfide-isomerase A4 | K.DVLIEFYAPWC*GHCK.Q | 54 |
| C555 | | | |
| P30101_ | PDIA3 Protein disulfide-isomerase A3 | K.DVLIEFYAPWC*GHCK.N | 55 |
| C406 | | | |
| P07437_ | TUBB Tubulin beta chain | K.TAVC*DIPPR.G | 56 |
| C354 | | | |
| P83731_ | RPL24 60S ribosomal protein L24 | K.C*ESAFLSK.R | 57 |
| C36 | | | |
| Q9ULV4_ | CORO1C Coronin-1C | K.C*DLISIPK.K | 58 |
| C420 | | | |
| P42677_ | RPS27 40S ribosomal protein S27 | R.LTEGC*SFR.R | 59 |
| C77 | | | |
| O00299_ | CLIC1 Chloride intracellular channel | KIGNC*PFSQR.L | 60 |
| C24 | protein 1 | | |
| P49458_ | SRP9 Signal recognition particle 9 | K.VTDDLVC*LVYK.T | 61 |
| C48 | kDa protein | | |
| P42765_ | ACAA2 3-ketoacyl-CoA thiolase, | R.LC*GSGFQSIVNGCQEICVK.E | 62 |
| C92 | mitochondrial | | |
| Q15233_ | NONO Non-POU domain-containing | R.FAC*HSASLTVR.N | 63 |
| C145 | octamer-binding protein | | |
| P50570_ | DNM2 Dynamin-2 | K.LQDAFSSIGQSC*HLDLPQIAVVGGQSAG | 64 |
| C27 | | K.S | |
| P25205_ | MCM3 DNA replication licensing | R.TLTSC*FLSCVVCVEGIVTK.C | 65 |
| C119 | factor MCM3 | | |
| Q5TFE4_ | NT5DC1 5-nucleotidase domain- | K.HFLSDTGMAC*R.S | 66 |
| C119 | containing protein 1 | | |
| Q99439_ | CNN2 Calponin-2 | K.C*ASQVGMTAPGTR.R | 67 |
| C215 | | | |
| Q06323_ | PSME1 Proteasome activator complex | K.VDVFREDLC*TK.T | 68 |
| C22 | subunit 1 | | |
| P49591_ | SARS Serine--tRNA ligase, | R.TIC*AILENYQTEK.G | 69 |
| C438 | cytoplasmic | | |
| Q96RS6_ | NUDCD1 NudC domain-containing | R.DSAQC*AAIAER.L | 70 |
| C376 | protein 1 | | |
| Q71U36_ | TUBA1A Tubulin alpha-1A chain | K.LADQC*TGLQGFLVFHSFGGGTGSGFTSL | 71 |
| C129 | | LMER.L | |
| Q9BXJ9_ | NAA15 N-alpha-acetyltransferase 15, | R.LFNTAVC*ESK.D | 72 |
| C721 | NatA auxiliary subunit | | |
| P33240_ | CSTF2 Cleavage stimulation factor | K.LC*VQNSPQEAR.N | 73 |
| C150 | subunit 2 | | |
| Q13155_ | AIMP2 Aminoacyl tRNA synthase | K.SPWLAGNELTVADVVLWSVLQQIGGC*S | 74 |
| C291 | complex-interacting multif | VTVPANVQR.W | |
| O75663_ | T1PRL TIP41-like protein | K.VAC*AEEWQESR.T | 75 |
| C87 | | | |
| P63244_ | GNB2L1 Guanine nucleotide-binding | K.VWNLANC*K.L | 76 |
| C182 | protein subunit beta-2-like 1 | | |
| Q7L2H7_ | EIF3M Eukaryotic translation | K.VAASC*GAIQYIPTELDQVR.K | 77 |
| C134 | initiation factor 3 subunit | | |
| P49327_ | FASN Fatty acid synthase | K.LTPGC*EAEAETEAICFFVQQFTDMEHNR. | 78 |
| C2359 | | V | |
| P42166_ | TMPO Lamina-associated polypeptide | K.VDDEILGFISEATPLGGIQAASTESC*NQQ | 79 |
| C561 | 2, isoform alpha | LDLALCR.A | |
| P24752_ | ACAT1 Acetyl-CoA | K.VC*ASGMK.A | 80 |
| C126 | acetyltransferase, mitochondrial | | |
| P36578_ | RPL4 60S ribosomal protein L4 | R.SGQGAFGNMC*R.G | 81 |
| C96 | | | |
| Q9NXG2_ | THUMPD1 THUMP domain- | R.RC*DAGGPR.Q | 82 |
| C31 | containing protein 1 | | |
| P07237_ | P4HB Protein disulfide-isomerase | K.KNVFVEFYAPWC*GHCK.Q | 83 |
| C397 | | | |
| P27707_ | DCK Deoxycytidine kinase | R.SC*PSFSASSEGTR.I | 84 |
| C9 | | | |
| O00303_ | EIF3F Eukaryotic translation initiation | K.TC*FSPNR.V | 85 |
| C256 | factor 3 subunit | | |
| Q9UNH7_ | SNX6 Sorting nexin-6 | K.SAADDYNRIGSSLYALGTQDSTDIC*KFF | 86 |
| C264 | | LK.V | |
| Q15084_ | PDIA6 Protein disulfide-isomerase A6 | K.DVIELTDDSFDKNVLDSEDVWMVEFYAP | 87 |
| C190 | | WC*GHCK.N | |
| O43390_ | HNRNPR Heterogeneous nuclear | K.SAFLC*GVMK.T | 88 |
| C99 | ribonucleoprotein R | | |
| Q96JB2_ | COG3 Conserved oligomeric Golgi | K.AAAENLPVPAELPIEDLC*SLTSQSLPIELT | 89 |
| C65 | complex subunit 3 | SVVPESTEDILLK.G | |
| P46109_ | CRKL Crk-Like protein | K.RVPC*AYDK.T | 90 |
| C249 | | | |
| P62888_ | RPL30 60S ribosomal protein L30 | R.VC*TLAIIDPGDSDIIR.S | 91 |
| C92 | | | |
| Q9NUY8_ | TBC1D23 TBC1 domain family | K.FLENTPSSLNIEDIEDLFSLAQYYC*SK.T | 92 |
| C283 | member 23 | | |
| Q09161_ | NCBP1 Nuclear cap-binding protein | K.SAC*SLESNLEGLAGVLEADLPNYK.S | 93 |
| C44 | subunit 1 | | |
| Q9UJW0_ | DCTN4 Dynactin subunit 4 | R.LLQPDFQPVC*ASQLYPR.H | 94 |
| C258 | | | |
| O15294_ | OGT UDP-N-acetylglucosamine- | K.C*PDGGDNADSSNTALNMPVIPMNTIAE | 95 |
| C758 | peptide N-acetylglucosaminyl | AVIEMINR.G | |
| | transferase | | |
| P38646_ | HSPA9 Stress-70 protein, | K.AKC*ELSSSVQTDINLPYLTMDSSGPK.H | 96 |
| C317 | mitochondrial | | |
| Q9HA64_ | FN3KRP Ketosamine-3-kinase | R.ATGHSGGGC*ISQGR.S | 97 |
| C24 | | | |
| Q9Y6G9_ | DYNCILI1 Cytoplasmic dynein 1 | R.VGSFGSSPPGLSSTYTGGPLGNEIASGNG | 98 |
| C51 | light intermediate chain 1 | GAAAGDDEDGQNLWSC*ILSEVSTR.S | |
| P52597_ | HNRNPF Heterogeneous nuclear | R.DLSYC*LSGMYDHR.Y | 99 |
| C267 | ribonucleoprotein F | | |
| Q99497_ | PARK7 Protein DJ-1 | K.GLIAAIC*AGPTALLAHEIGFGSK.V | 100 |
| C106 | | | |
| P57764_ | GSDMD Gasdermin-D | R.C*LHNFLTDGVPAEGAFTEDFQGLR.A | 101 |
| C268 | | | |
| A6NDG6_ | PGP Phosphoglycolate phosphatase | K.NNQESDC*VSK.K | 102 |
| C297 | | | |
| Q14566_ | MCM6 DNA replication licensing | R.LVFLAC*CVAPTNPR.F | 103 |
| C301 | factor MCM6 | | |
| Q00610_ | CLTC Clathrin heavy chain 1 | R.IHEGC*EEPATHNALAK.I | 104 |
| C870 | | | |
| Q96T76_ | MMS19 MMS19 nucleotide excision | R.LMGLLSDPELGPAAADGFSLLMSDC*TD | 105 |
| C848 | repair protein homolog | VLTR.A | |
| P61158_ | ACTR3 Actin-related protein 3 | R.YSYVC*PDLVK.E | 106 |
| C235 | | | |
| P23528_ | CFL1 Cofilin-1 | K.MLPDKDC*R.Y | 107 |
| C80 | | | |
| Q9NQ88_ | TIGAR Fructose-2,6-bisphosphatase | K.EADQKEQFSQGSPSNC*LETSLAEIFPLGK. | 108 |
| C161 | TIGAR | N | |
| Q9UKF6_ | CPSF3 Cleavage and polyadenylation | R.NFNYHILSPC*DLSNYTDLAMSTVK.Q | 109 |
| C498 | specificity factor subunit | | |
| Q8TAQ2_ | SMARCC2 SWI/SNF complex | R.PNIFLC*PEIEPK.L | 110 |
| C145 | subunit SMARCC2 | | |
| P68036_ | UBE2L3 Ubiquitin-conjugating | K.GQVC*LPVISAENWKPATK.T | 111 |
| C86 | enzyme E2 L3 | | |
| Q9Y3A3_ | MOB4 MOB-like protein phocein | R.HTLDGAAC*LLNSNK.Y | 112 |
| C134 | | | |
| P49588_ | AARS Alanine-tRNA ligase, | K.C*LSVMEAK.V | 113 |
| C773 | cytoplasmic | | |
| Q961J6_ | GMPPA Mannose-1 -phosphate | K.LLPAITILGC*R.V | 114 |
| C389 | guanyltransferase alpha | | |
| P27635_ | RPL10 60S ribosomal protein L10 | K.MLSC*AGADR.L | 115 |
| C105 | | | |
| O15145_ | ARPC3 Actin-related protein 2/3 | K.WWTC*FVK.R | 116 |
| C162 | complex subunit 3 | | |
| P48643_ | CCT5 T-complex protein 1 subunit | K.IAILTC*PFEPPKPK.T | 117 |
| C253 | epsilon | | |
| P11586_ | MTHFD1 C-1-tetrahydrofolate | R.ASVGAGFLYPLVGTMSTMPGLPTRPC*F | 118 |
| C918 | synthase, cytoplasmic | YDIDLDPETEQVNGLF | |
| Q96GX2_ | ATXN7L3B Putative ataxin-7-like | R.LPLC*SLPGEPGNGPDQQLQRS | 119 |
| C75 | protein 3B | | |
| P17987_ | TCP1 T-complex protein 1 subunit | K.VLC*ELADLQDK.E | 120 |
| C76 | alpha | | |
| Q9NYL9_ | TMOD3 Tropomodulin-3 | K.VSLDPELEEALTSASDTELC*DLAAILGM | 121 |
| C132 | | HNLITNTK.F | |
| O00429_ | DNM1L Dynkamin-1-like protein | R.IC*YIFHETFGR.T | 122 |
| C367 | | | |
| Q13155_ | AIMP2 Aminoacyl tRNA synthase | R.VELPTC*MYR.L | 123 |
| C23 | complex-interacting multif | | |
| P30101_ | PDIA3 Protein disulfide-isomerase A3 | R.ISDTGSAGLMLVEFFAPWC*GHCK.R | 124 |
| C571 | | | |
| Q9ULA0_ | DNPEP Aspartyl aminopeptidase | K.C*PTSGR.L | 125 |
| C144 | | | |
| Q9BWD1_ | ACAT2 Acetyl-CoA | R.QASVGAGIPYSVPAWSCQMIC*GSGLK.A | 126 |
| C92 | acetyltransferase, cytosolic | | |
| Q8NBS9_ | TXNDC5 Thioredoxin domain- | K.FYAPWC*GHCK.T | 127 |
| C350 | containing protein 5 | | |
| P68366_ | TUBA4A Tubulin alpha-4A chain | K.TIGGGDDSFTTFFC*ETGAGK.H | 128 |
| C54 | | | |
| P04183_ | TK1 Thymidine kinase, cytosolic | R.YSSSFC*THDR.N | 129 |
| C66 | | | |
| Q15021_ | NCAPD2 Condensin complex subunit | K.NAIQLLASFLANNPFSC*K.L | 130 |
| C439 | 1 | | |
| QSWUM4_ | PDCD6IP Programmed cell death 6- | K.HC*IMQANAEYHQSILAK.Q | 131 |
| C250 | interacting protein | | |
| Q96F86_ | EDC3 Enhancer of mRNA-decapping | K.DLPTSPVDLVINCLDC*PENVFLR.D | 132 |
| C413 | protein 3 | | |
| P35754_ | GLRX Glutaredoxin-1 | K.VVVFIKPTC*PYCR.R | 133 |
| C23 | | | |
| Q9NQ88_ | TIGAR Fructose-2,6-bisphosphatase | R.EEC*PVFTPPGGETLDQVK.M | 134 |
| C114 | TIGAR | | |
| P12268_ | IMPDH2 Inosine-5-monophosphate | R.VGMGSGSIC*ITQEVLACGRPQATAVYK. | 135 |
| C331 | dehydrogenase 2 | V | |
| P25705_ | ATP5A1 ATP synthase subunit alpha, | K.TIVVSATASDAAPLQYLAPYSGC*SMGE | 136 |
| C294 | mitochondrial | YFR.D | |
| P15374_ | UCHL3 Ubiquitin carboxyl-terminal | K.QTISNAC*GTIGLIHAIANNK.D | 137 |
| C95 | hydrolase isozyme L3 | | |
| P83731_ | RPL24 60S ribosomal protein L24 | K.VELC*SFSGYK.I | 138 |
| C6 | | | |
| Q9NX24_ | NHP2 H/ACA ribonucleoprotein | K.IKADPDGPEAQAEAC*SGER.T | 139 |
| C18 | complex subunit 2 | | |
| Q13418_ | ILK Integrin-linked protein lcinase | FSFQCPGRK.FSFQC*PGR.M | 140 |
| C346 | | | |
| Q13428_ | TCOF1 Treacle protein | K.C*FLAQPVTLLDIYTHWQQTSELGR.K | 141 |
| C38 | | | |
| P24941_ | CDK2 Cyclin-dependent kinase 2 | R.APEILLGC*K.Y | 142 |
| C177 | | | |
| P43686_ | PSMC4 26S protease regulatory | R.GVLMYGPPGC*GK.T | 143 |
| C210 | subunit 6B | | |
| Q9BTA9_ | WAC WW domain-containing adapter | R.STC*SLTPALAAHFSENLIK.H | 144 |
| C553 | protein with coiled-coil | | |
| O14929_ | HAT1 Histone acetyltransferase type | K.VDENFDC*VEADDVEGK.I | 145 |
| C101 | B catalytic subunit | | |
| O75521_ | ECI2 Enoyl-CoA delta isomerase 2, | R.WLSDEC*TNAVVNFLSR.K | 146 |
| C380 | mitochondrial | | |
| P11586_ | MTHFD1 C-1-tetrahydrofolate | K.QGFGNLPIC*MAK.T | 147 |
| C863 | synthase, cytoplasmic | | |
| P27707_ | DCK Deoxycytidine kinase | K.QLC*EDWEVVPEPVAR.W | 148 |
| C45 | | | |
| A0AVT1_ | UBA6 Ubiquitin-like modifier- | R.KPNVGC*QQDSEELLK.L | 149 |
| C347 | activating enzyme 6 | | |
| Q96AB3_ | ISOC2 Isochorismatase domain- | R.SVLLCGIEAQAC*ILNTTLDLLDR.G | 150 |
| C114 | containing protein 2, mitochondrial | | |
| Q14203_ | DCTN1 Dynactin subunit 1 | K.VTFSC*AAGFGQR.H | 151 |
| C1252 | | | |
| Q9BTE3_ | MCMBP Mini-chromosome | R.DASALLDPMEC*TDTAEEQR.V | 152 |
| C287 | maintenance complex-binding protein | | |
| O95373_ | IPO7 Importin-7 | R.GIDQC*IPLFVEAALER.L | 153 |
| C757 | | | |
| P22061_ | PCMT1 Protein-L-isoaspartate(D- | R.MVGC*TGK.V | 154 |
| C102 | aspartate) O-methyltransferase | | |
| P55060_ | CSE1L Exportin-2 | K.KIC*AVGITK.L | 155 |
| C842 | | | |
| Q9BX19_ | NAA15 N-alpha-acetyltransferase 15, | K.GC*PPVFNTLR.S | 156 |
| CC322 | NatA auxiliary subunit | | |
| P62333_ | PSMC6 26S protease regulatory | K.GC*LLYGPPGTGK.T | 157 |
| C170 | subunit 10B | | |
| Q15398_ | DLGAP5 Disks large-associated | R.YRPDMPC*FLLSNQNAVK.A | 158 |
| C129 | protein 5 | | |
| Q9BVC5_ | C2orf49 Ashwin | R.SC*TDSELLLHPELLSQEFLLLTLEQK.N | 159 |
| C10 | | | |
| P62280_ | RPS11 40S ribosomal protein S11 | K.NMSVHLSPC*FR.D | 160 |
| C116 | | | |
| P42224_ | STAT1 Signal transducer and | R.QQSACIGGPPNAC*LDQLQNWFTIVAESL | 161 |
| C255 | activator of transcription 1 | QQVR.Q | |
| Q96RN5_ | MED15 Mediator of RNA polymerase | K.QQYLC*QPLLDAVLANIR.S | 162 |
| C618 | II transcription subunit | | |
| Q6UB35_ | MTHFD1L Monofunctional C1- | R.ASIGAGFIYPLVGTMSTMPGLPTRPC*FY | 163 |
| C961 | tetrahydrofolate synthase, | DIDLDTETEQVK.G | |
| | mitochondrial | | |
| P23919_ | DTYMK Thymidylate kinase | R.C*FHQLMK.D | 164 |
| C163 | | | |
| Q92616_ | GCN1L1 Translational activator | K.GMGESC*FEDLLPWLMETLTYEQSSVDR. | 165 |
| C1692 | GCN1 | S | |
| P42166_ | TMPO Lamina-associated polypeptide | K.SGIQPLC*PER.S | 166 |
| C341 | 2, isoform alpha | | |
| O95571_ | ETHE1 Protein ETHE1, | R.TDFQQGC*AK.T | 167 |
| C170 | mitochondrial | | |
| O14777_ | NDC80 Kinetochore protein NDC80 | K.FNPEAGANC*LVK.Y | 168 |
| C449 | homolog | | |
| P36542_ | ATP5C1 ATP synthase subunit | R.GLC*GAIHSSIAK.Q | 169 |
| C103 | gamma, mitochondrial | | |
| Q9Y3D0_ | FAM96B Mitotic spindle-associated | R.VQVSDPESTVAVAFTPTIPHC*SMATLIGL | 170 |
| C93 | MMXD complex subunit Mi | SIK.V | |
| P54136_ | RARS Arginine-tRNA ligase, | K.NCGC*LGASPNLEQLQEENLK.L | 171 |
| C34 | cytoplasmic | | |
| Q96T76_ | MMS19 MMS19 nucleotide excision | R.YHPLSSC*LTAR.L | 172 |
| C819 | repair protein homolog | | |
| Q8TBC4_ | UBA3 NEDD8-activating enzyme E1 | R.VILPGMTACIECTLELYPPQVNFPMC*TIA | 173 |
| C237 | catalytic subunit | SMPR.L | |
| Q13573_ | SNW1 SNW domain-containing | K.IPPC*ISNWK.N | 174 |
| C250 | protein 1 | | |
| P46734_ | MAP2K3 Dual specificity mitogen- | K.MC*DFGISGYLVDSVAK.T | 175 |
| C207 | activated protein kinase | | |
| P34932_ | HSPA4 Heat shock 70 kDa protein 4 | R.AGGIETIANEYSDRC*TPACISFGPK.N | 176 |
| C34 | | | |
| Q9UBR2_ | CTSZ Cathepsin Z | R.NQHIPQYCGSC*WAHASTSAMADR.I | 177 |
| C92 | | | |
| Q16763_ | UBE2S Ubiquitin-conjugating enzyme | K.C*LLIRPNPESALNEEAGR.L | 178 |
| C118 | E2 S | | |
| Q06203_ | PPAT | K.C*ELENCQPFVVETLHGKI | 179 |
| C100 | Amidophosphoribosyltransferase | | |
| P51649_ | ALDH5A1 Succinate-semialdehyde | R.NTGQTC*VCSNQFLVQR.G | 180 |
| C340 | dehydrogenase, mitochondrial | | |
| P43246_ | MSH2 DNA mismatch repair protein | K.KGVC*DQSFGIHVAELANFPK.H | 181 |
| C822 | Msh2 | | |
| P27708_ | CAD CAD protein | K.AQILVLTYPLIGNYGIPPDEMDEFGLC*K. | 182 |
| C73 | | W | |
| Q16822_ | PCK2 Phosphoenolpyruvate | R.YVAAAFPSAC*GK.T | 183 |
| C306 | carboxylcinase | | |
| Q01813_ | PFKP 6-phosphofructokinase type C | R.NESC*SENYTTDFIYQLYSEEGK.G | 184 |
| C641 | | | |
| Q96CM8_ | ACSF2 Acyl-CoA synthetase family | R.MVSTPIGGLSYVQGC*TK.K | 185 |
| C64 | member 2, mitochondrial | | |
| Q9BUK6_ | MSTO1 Protein misato homolog 1 | K.VVTAGAIIPFPLAPGQSLPDSLMQFGGAT | 186 |
| C403 | | PWTPLSAC*GEPSGTR.C | |
| P22234_ | PA1CS Multifunctional protein ADE2 | R.LPSGLGC*STVLSPEGSAQFAAQIFGLSNH | 187 |
| C374 | | LVWSK.L | |
| Q6ICB0_ | DESI1 Desumoylating isopeptidase 1 | R.GEAYNLFEHNC*NTFSNEVAQFLTGRK | 188 |
| C108 | | | |
| P62333_ | PSMC6 26S protease regulatory | R.AVASQLDC*NFLK.V | 189 |
| C193 | subunit 10B | | |
| Q8IUR0_ | TRAPPC5 Trafficking protein particle | K.ENSTLNC*ASFTAGIVEAVLTHSGFPAK.V | 190 |
| C139 | complex subunit 5 | | |
| Q01813_ | PFKP 6-phosphofructokinase type C | K.YAYLNVVGMVGSIDNDFC*GTDMTIGTD | 191 |
| C179 | | SALHR.I | |
| P38606_ | ATP6V1A V-type proton ATPase | K.WDFTPC*K.N | 192 |
| C138 | catalytic subunit A | | |
| P82932_ | MRPS6 28S ribosomal protein S6, | K.EC*EGIVPVPLAEK.L | 193 |
| C105 | mitochondrial | | |
| Q9NS86_ | LANCL2 LanC-like protein 2 | R.SVVC*QESDLPDELLYGR.A | 194 |
| C187 | | | |
| Q9ULV4_ | CORO1C Coronin-1C | K.SIKDTIC*NQDER.I | 195 |
| C456 | | | |
| P09110_ | ACAA1 3-ketoacyl-CoA thiolase, | K.VNPLGGAVALGHPLGC*TGAR.Q | 196 |
| C381 | peroxisomal | | |
| Q9HAV7_ | GRPEL1 GrpE protein homolog 1, | K.ATQC*VPKEEIKDDNPHLK.N | 197 |
| C124 | mitochondrial | | |
| Q14738_ | PPP2R5D Serine/threonine-protein | K.C*TAKPSSSGK.D | 198 |
| C17 | phosphatase 2A 56 kDa regulatory | | |
| | subunit delta isoform | | |
| Q99757_ | TXN2 Thioredoxin, mitochondrial | R.VVNSETPVVVDFHAQWC*GPCK.I | 199 |
| C90 | | | |
| P51570_ | GALK1 Galactokinase | R.AQVCQQAEHSFAGMPC*GIMDQFISLMG | 200 |
| C182 | | QK.G | |
| Q06330_ | RBPJ Recombining binding protein | R.IIQFQATPC*PK.E | 201 |
| C313 | suppressor of hairless | | |
| Q9NVC6_ | MED17 Mediator of RNA polymerase | K.MELLMSALSPC*LL | 202 |
| C649 | II transcription subunit | | |
| Q99832_ | CCT7 T-complex protein 1 subunit eta | R.INALTAASEAAC*LIVSVDETIK.N | 203 |
| C511 | | | |
| Q9BTE3_ | MCMBP Mini-chromosome | K.LQHINPLLPAC*LNKEESK.T | 204 |
| C325 | maintenance complex-binding protein | | |
| P04183_ | TK1 Thymidine kinase, cytosolic | R.KLFAPQQILQC*SPAN | 205 |
| C230 | | | |
| Q96S55_ | WRNIP1 ATPase WRNIP1 | R.SLLETNEIPSLILWGPPGC*GK.T | 206 |
| C272 | | | |
| Q0VGL1_ | C7orf59 UPF0539 protein C7orf59 | R.IPDQLGYLVLSEGAVLASSGDLENDEQA | 207 |
| C51 | | ASAISELVSTAC*GFR.L | |
| Q86W42_ | THOC6 THO complex subunit 6 | R.LHMTIFSQSVSPC*GK.F | 208 |
| C35 | homolog | | |
| O14980_ | XPO1 Exportin-1 | K.DLLGLC*EQKR.G | 209 |
| C528 | | | |
| P43246_ | MSH2 DNA mismatch repair protein | K.HVIEC*AK.Q | 210 |
| C843 | Msh2 | | |
| Q00839_ | HNRNPU Heterogeneous nuclear | R.APQC*LGK.F | 211 |
| C562 | ribonucleoprotein U | | |
| Q8WW01 | TSEN15 tRNA-splicing endonuclease | R.GDSEPTPGC*SGLGPGGVR.G | 212 |
| C13 | subunit Sen15 | | |
| O60610_ | DIAPH1 Protein diaphanous homolog | R.KAGC*AVTSLLASELTK.D | 213 |
| C1227 | 1 | | |
| Q9NVM9_ | Asun Protein asunder homolog | R.ISPVDVNSRPSSC*LTNFLLNGR.S | 214 |
| C349 | | | |
| O15067_ | PFAS | K.FC*DNSSAIQGK.E | 215 |
| C270 | Phosphodbosylformylglycinamidine | | |
| | synthase | | |
| P38606_ | ATP6V1A V-type proton ATPase | R.VLDALFPCVQGGTTAIPGAFGC*GK.T | 216 |
| C254 | catalytic subunit A | | |
| Q8NBS9_ | TXNDC5 Thioredoxin domain- | K.FFAPWC*GHCK.A | 217 |
| C217 | containing protein 5 | | |
| P35611_ | ADD1 Alpha-adducin | R.VSMILQSPAFC*EELESMIQEQFKK.G | 218 |
| C68 | | | |
| P42224_ | STAT1 Signal transducer and | R.NLSFFLTPPC*AR.W | 219 |
| C492 | activator of transcription 1 | | |
| P46940_ | IQGAP1 Ras GTPase-activating-like | K.KQIPAITC*IQSQWR.G | 220 |
| C781 | protein IQGAP1 | | |
| O95229_ | ZWINT ZW10 interactor | K.DKLLC*SQLQVADFLQNILAQEDTAK.G | 221 |
| C54 | | | |
| Q969Q0_ | RPL36AL 60S ribosomal protein | R.C*KHFELGGDK.K | 222 |
| C88 | L36a-like | | |
| Q29RF7_ | PDS5A Sister chromatid cohesion | R.TVQTIEAC*IANFFNQVLVLGR.S | 223 |
| C242 | protein PDS5 homolog A | | |
| Q2NL82_ | TSR1 Pre-rRNA-processing protein | R.DTGTVHLNELGNTQNFMLLC*PR.L | 224 |
| C126 | TSR1 homolog | | |
| Q9UKX7_ | NUP50 Nuclear pore complex protein | K.AC*VGNAYHK.Q | 225 |
| C151 | Nup50 | | |
| P18621_ | RPL17 60S ribosomal protein L17 | R.INPYMSSPC*HIEMILTEK.E | 226 |
| C144 | | | |
| P49189_ | ALDH9A1 4- | K.GALMANFLTQGQVC*CNGTR.V | 227 |
| C288 | trimethylaminobutyraldehyde | | |
| | dehydrogenase | | |
| P45985_ | MAP2K4 Dual specificity mitogen- | K.LC*DFGISGQLVDSIAK.T | 228 |
| C246 | activated protein kinase | | |
| Q13428_ | TCOF1 Treacle protein | K.KGAGNPQASTLALQSNITQC*LLGQPWPL | 229 |
| C1298 | | NEAQVQASVVK.V | |
| Q9BRF8_ | CPPED1 Calcineurin-like | K.AWSTGDC*DNGGDEWEQEIR.L | 230 |
| C54 | phosphoesterase domain-containing | | |
| O00170_ | AIP AH receptor-interacting protein | R.HCC*GVAQMR.E | 231 |
| C122 | | | |
| Q9UNI6_ | DUSP12 Dual specificity protein | R.QAQC*TSYFIEPVQWMESALLGVMDGQL | 232 |
| C265 | phosphatase 12 | LCPK.C | |
| P52657_ | GTF2A2 Transcription initiation | R.FC*DNVWTFVLNDVEFR.E | 233 |
| C68 | factor IIA subunit 2 | | |
| O15067_ | PFAS | R.GLAPLHWADDDGNPTEQYPLNPNGSPGG | 234 |
| C1287 | Phosphoribosylformylglycinamidine | VAGICSC*DGR.H | |
| | synthase | | |
| P37235_ | HPCAL1 Hippocalcin-like protein 1 | R.LLQC*DPSSASQF | 235 |
| C185 | | | |
| P53602_ | MVD Diphosphomevalonate | R.DGDPLPSSLSC*K.V | 236 |
| C108 | decarboxylase | | |
| Q96C19_ | EFHD2 EF-hand domain-containing | K.AAAGELQEDSGLC*VLAR.L | 237 |
| C172 | protein D2 | | |
| Q9NQC3_ | RTN4 Reticulon-4 | K.YSNSALGHVNC*TIK.E | 238 |
| C1101 | | | |
| O43175_ | PHGDH D-3-phosphoglycerate | K.NAGNC*LSPAVIVGLLK.E | 239 |
| C369 | dehydrogenase | | |
| Q99638_ | RAD9A Cell cycle checkpoint control | R.LVVQLHC*K.F | 240 |
| C114 | protein RAD9A | | |
| Q06830_ | PRDX1 Peroxiredoxin-1 | K.LNCQVIGASVDSHFC*HLAWVNTPK.K | 241 |
| C83 | | | |
| Q00796_ | SORD Sorbitol dehydrogenase | R.MHSVGIC*GSDVHYWEYGR.I | 242 |
| C45 | | | |
| Q9NRG0_ | CHRAC1 Chromatin accessibility | K.ATELFVQC*LATYSYR.H | 243 |
| C55 | complex protein 1 | | |
| P31949_ | S100A11 Protein S100-A11 | K.KLDTNSDGQLDFSEFLNLIGGLAMAC*H | 244 |
| C91 | | DSFLK.A | |
| Q9NY65_ | TUBA8 Tubulin alpha-8 chain | R.TIQFVDWC*PTGFK.V | 245 |
| C347 | | | |
| Q9NXV6_ | CDKN2AIP CDKN2A-interacting | K.SVYLGTGC*GK.S | 246 |
| C516 | protein | | |
| Q13162_ | PRDX4 Peroxiredoxin-4 | R.TREEEC*HFYAGGQVYPGEASR.V | 247 |
| C51 | | | |
| Q14997_ | PSME4 Proteasome activator complex | K.QQFTDDQLLVLTDLLVSPC*YYA | 248 |
| C1840 | subunit 4 | | |
| Q15003_ | NCAPH Condensin complex subunit 2 | R.TMC*PLLSMXPGEYSYFSPR.T | 249 |
| C418 | | | |
| Q01433_ | AMPD2 AMP deaminase 2 | R.SLPGPAPC*LK.H | 250 |
| C107 | | | |
| O75874_ | IDH1 Isocitrate dehydrogenase | K.SEGGFIWAC*K.N | 251 |
| C269 | | | |
| Q29RF7_ | PDS5A Sister chromatid cohesion | R.ELLDLHKQPTSEANC*SAMFGK.L | 252 |
| C532 | protein PDS5 homolog A | | |
| P11498_ | PC Pyruvate carboxylase, | FLYECPWRR.FLYEC*PWR.R | 253 |
| C622 | mitochondrial | | |
| P49411_ | TUFM Elongation factor Tu, | K.NMITGTAPLDGC*ILVVAANDGPMPQTR. | 254 |
| C147 | mitochondrial | E | |
| Q9H0C8_ | ILKAP Integrin-linked kinase- | R.C*GVTSVPDIR.R | 255 |
| C301 | associated serine/threonine | | |
| Q02252_ | ALDH6A1 Methyhrialonate- | R.C*MALSTAVLVGEAK.K | 256 |
| C317 | semialdehyde dehydrogenase | | |
| O00487_ | PSMD14 26S proteasome non- | K.SWMEGLTLQDYSEHC*K.H | 257 |
| C238 | ATPase regulatory subunit 14 | | |
| P23919_ | DTYMK Thymidylate kinase | K.ENFSLDWC*K.Q | 258 |
| C117 | | | |
| O75362_ | ZNF217 Zinc finger protein 217 | R.C*IPQLDPFTTFQAWQLATK.G | 259 |
| C286 | | | |
| P10644_ | PRKAR1A cAMP-dependent protein | R.EC*ELYVQK.H | 260 |
| C18 | kinase type I-alpha regulatory subunit | | |
| | alpha | | |
| P51610_ | HCFC1 Host cell factor 1 | R.VAGINAC*GR.G | 261 |
| C1872 | | | |
| P0CB43_ | FAM203B Protein FAM203B | R.HVLALTGC*GPGR.A | 262 |
| C51 | | | |
| O60825_ | PFKFB2 6-phosphofructo-2- | K.VFFVESVC*DDPDVIAANILEVK.V | 263 |
| C158 | kinase/fructose-2,6-bisphosphatase | | |
| Q15813_ | TBCE Tubulin-specific chaperone E | R.NCAVSC*AGEK.G | 264 |
| C141 | | | |
| P30044_ | PRDX5 Peroxiredoxin-5, | K.GVLFGVPGAFTPGC*SK.T | 265 |
| C100 | mitochondrial | | |
| Q8N1F7_ | NUP93 Nuclear pore complex protein | K.SSGQSAQLLSHEPGDPPC*LR.R | 266 |
| C522 | Nup93 | | |
| Q9P0J1_ | PDP1 | R.GMLLGVFDGHAGC*ACSQAVSER.L | 267 |
| C149 | | | |
| P07858_ | CTSB Cathepsin B | R.GQDHC*GIESEVVAGEPR.T | 268 |
| C319 | | | |
| P12814_ | ACTN1 Alpha-actinin-1 | R.MVSDINNAWGC*LEQVEK.G | 269 |
| C370 | | | |
| O15294_ | OGT UDP-N-acetylglucosamine- | K.VMAEANHFIDLSQIPC*NGK.A | 270 |
| C620 | peptide N-acetylglucosaminyl | | |
| | transferase | | |
| Q86WS5_ | TMPRSS12 Transmembrane protease | R.RREGGAHAEDC*GTAPLK.D | 271 |
| C64 | serine 12 | | |
| Q9NQW6_ | ANLN Actin-binding protein anillin | K.NNAFPC*QVNIK.Q | 272 |
| C712 | | | |
| Q9NY27_ | PPP4R2 Serine/threonine-protein | K.EVC*PVLDQFLCHVAIGT | 273 |
| C22 | phosphatase 4 regulatory | | |
| P40763_ | STAT3 Signal transducer and | R.QQIACIGGPPNIC*LDRLENWITSLAESQL | 274 |
| C259 | activator of transcription 3 | QTR.Q | |
| O60701_ | UGDH UDP-glucose 6- | K.ASVGFGGSC*FQKDVLNLVYLCEALNLP | 275 |
| C276 | dehydrogenase | EVAR.Y | |
| Q09666_ | AHNAK Neuroblast differentiation- | R.EVFSSC*SSEVVLSGDDEEYQR.I | 276 |
| C108 | associated protein AHNA | | |
| P49773_ | HINT1 Histidine triad nucleotide- | K.C*AADLGLNK.G | 277 |
| C84 | binding protein 1 | | |
| O95071_ | UBR5 E3 ubiquitin-protein ligase | R.SFYTAIAQAFLSNEKLPNLEC*IQNANK.G | 278 |
| C2314 | UBR5 | | |
| Q9Y3Z3_ | SAMHD1 SAM domain and HD | K.NPIDHVSFYC*K.T | 279 |
| C522 | domain-containing protein 1 | | |
| O75717_ | WDHD1 WD repeat and HMG-box | K.MLALSC*K.L | 280 |
| C773 | DNA-binding protein 1 | | |
| Q9NPF4_ | OSGEP Probable tRNA | R.AMAHCGSQEALIVGGVGC*NVR.L | 281 |
| C265 | threonylcarbamoyladenosine | | |
| | biosynthesis protein OSGEP | | |
| P16455_ | MGMT Methylated-DNA-protein- | R.VVC*SSGAVGNYSGGLAVK.E | 282 |
| C150 | cysteine methyltransferase | | |
| P49327_ | FASN Fatty acid synthase | R.HAQPTC*PGAQLCTVYYASLNFR.D | 283 |
| C1558 | | | |
| Q96GG9_ | DCUN1D1 DCN1-like protein 1 | R.AATQC*EFSK.Q | 284 |
| C115 | | | |
| P13797_ | PL,S3 Plastin-3 | K.DELDELKEAFAKVDLNSNGFIC*DYELHE | 285 |
| C33 | | LFK.E | |
| P37198_ | NUP62 Nuclear pore glycoprotein p62 | K.DIIEHLNTSGAPADTSDPLQQIC*K.I | 286 |
| C475 | | | |
| P00813_ | ADA Adenosine deaminase | K.FDYYMPAIAGC*R.E | 287 |
| C75 | | | |
| O75153_ | KIAA0664 Clustered mitochondria | R.IATPFQVYSWTAPQAEHAMDC*VR.A | 288 |
| C333 | protein homolog | | |
| A6NDU8_ | C5orf51 UPF0600 protein C5orf51 | R.C*PIQLNEGVSFQDLDTAK.L | 289 |
| C179 | | | |
| Q9BWU1_ | CDK19 Cyclin-dependent kinase 19 | R.ITSEQALQDPYFQEDPLPTLDVFAGC*QIP | 290 |
| C349 | | YPK.R | |
| Q15208_ | STK38 Serine/threonine-protein | K.LSDFGLC*TGLK.K | 291 |
| C234 | kinase 38 | | |
| Q9UKV3_ | ACIN1 Apoptotic chromatin | K.AAPC*IYWLPLTDSQIVQK.E | 292 |
| C1223 | condensation inducer in the nucleus | | |
| P45984_ | MAPK9 Mitogen-activated protein | R.TAC*TNFMMTPYVVTR.Y | 293 |
| C177 | kinase 9 | | |
| Q14204_ | DYNC1H1 Cytoplasmic dynein 1 | K.TSAPITC*ELLNK.Q | 294 |
| C1999 | heavy chain 1 | | |
| P29590_ | PML Protein PML | R.LQDLSSC*ITQGK.D | 295 |
| C389 | | | |
| P62333_ | PSMC6 26S protease regulatory | R.DHQPC*IIFMDEIDAIGGR.R | 296 |
| C228 | subunit 10B | | |
| P13796_ | LCP1 Plastin-2 | K.EGIC*AIGGTSEQSSVGTQHSYSEEEK.Y | 297 |
| C101 | | | |
| Q9NWV8_ | BABAM1 BRISC and BRCA1-A | R.TILVYSRPPC*QPQFSLTEPMKK.M | 298 |
| C222 | complex member 1 | | |
| O14879_ | IFIT3 Interferon-induced protein with | K.GLNPLNAYSDLAEFLETEC*YQTPFNK.E | 299 |
| C343 | tetratricopeptide | | |
| P50749_ | RASSF2 Ras association domain- | R.ILQGPC*EQISK.V | 300 |
| C251 | containing protein 2 | | |
| O43396_ | TXNL1 Thioredoxin-like protein 1 | R.GC*GPCLR.I | 301 |
| C34 | | | |
| P35658_ | NUP214 Nuclear pore complex | K.AC*FQVGTSEEMK.M | 302 |
| C728 | protein Nup214 | | |
| P42166_ | TMPO Lamina-associated polypeptide | K.GGTLFGGEVC*K.V | 303 |
| C684 | 2, isoform alpha | | |
| Q96FX7_ | TRMT61A tRNA (adenine(58)-N(1))- | R.FCSFSPC*IEQVQR.T | 304 |
| C209 | methyltransferase catalytic | | |
| Q71U36_ | TUBA1A Tubulin alpha-1A chain | K.LEFSIYPAPQVSTAVVEPYNSILTTHTTLE | 305 |
| C200 | | HSDC*AFMVDNEAIYDICR.R | |
| O75822_ | EIF3J Eukaryotic translation initiation | K.ITNSLTVLC*SEK.Q | 306 |
| C207 | factor 3 subunit | | |
| Q9UBQ7_ | GRHPR Glyoxylate | R.QPRPEEAAEFQAEFVSTPELAAQSDFTVV | 307 |
| C216 | reductase/hydroxypyruvate reductase | AC*SLTPATEGLCNK.D | |
| P51946_ | CCNH Cyclin-H | K.ENRTC*LSQLLDIMK.S | 308 |
| C244 | | | |
| P05091_ | ALDH2 Aldehyde dehydrogenase, | K.SPNIIMSDADMDWAVEQAHFALFFNQGQ | 309 |
| C319 | mitochondrial | CC*CAGSR.T | |
| Q9NZL4_ | HSPBP1 Hsp70-binding protein 1 | R.LLDRDAC*DTVR.V | 310 |
| C204 | | | |
| O75439_ | PMPCB Mitochondrial-processing | K.FIEFGDSLC*THK.G | 311 |
| C265 | peptidase subunit beta | | |
| Q16527_ | CSRP2 Cysteine and glycine-rich | R.C*CFLCMVCR.K | 312 |
| C33 | protein 2 | | |
| Q8TC07_ | TBC1D15 TBC1 domain family | R.TLLVNC*QNK.S | 313 |
| C197 | member 15 | | |
| P07858_ | CTSB Cathepsin B | K.IC*EPGYSPTYK.Q | 314 |
| C211 | | | |
| Q15149_ | PLEC Plectin | K.GRLC*FEGLR.S | 315 |
| C3110 | | | |
| Q9NUP9_ | LIN7C Protein lin-7 homolog C | R.VLQSEFC*NAVR.E | 316 |
| C47 | | | |
| Q14683_ | SMC1A Structural maintenance of | R.EALIEIDYGDLC*EDLKDAQAEEEIKQEM | 317 |
| C987 | chromosomes protein lA | NTLQQK.L | |
| P09110_ | ACAA1 3-ketoacyl-CoA thiolase, | K.ARDC*LIPMGITSENVAER.F | 318 |
| C177 | peroxisomal | | |
| A9UHW6_ | MEF4GD MIF4G domain-containing | K.VANVIVDHSLQDC*VFSK.E | 319 |
| C49 | protein | | |
| Q9NPH0_ | ACP6-Lysophosphatidic acid | R.MGIDSSDKVDFFILLDNVAAEQAHNLPSC | 320 |
| C267 | phosphatase type 6 | *PMLK.R | |
| Q92878_ | RAD50 DNA repair protein RAD50 | RAD50 K.C*SVSSLGFNVH | 321 |
| C1302 | | | |
| O14933_ | UBE2L6 Ubiquitin/ISG15- | K.IYHPNVDENGQICLPIISSENWKPC*TK.T | 322 |
| C98 | conjugating enzyme E2 L6 | | |
| P39023_ | RPL3 60S ribosomal protein L3 | K.VAC*IGAWHPAR.V | 323 |
| C253 | | | |
| Q9UHD8_ | SEPT9 Septin-9 | K.WGTIEVENTTHC*EFAYLR.D | 324 |
| C531 | | | |
| P42167_ | TMPO Lamina-associated polypeptide | K.EMFPYEASTPTGISASC*R.R | 325 |
| C363 | 2, isoforms beta/gamma | | |
| Q14790_ | CASP8 Caspase-8 | K.VFFIQAC*QGDNYQK.G | 326 |
| C360 | | | |
| Q15149_ | PLEC Plectin | K.YLTC*PK.T | 327 |
| C4574 | | | |
| Q9UJY4_ | GGA2 ADP-ribosylation factor- | R.NLLDLLSAQPAPC*PLNYVSQK.S | 328 |
| C429 | binding protein GGA2 | | |
| Q15306_ | IRF4 Interferon regulatory factor 4 | R.DYVPDQPHPEIPYQC*PMTFGPR.G | 329 |
| C194 | | | |
| Q6L8Q7_ | PDE12 2,5-phosphodiesterase 12 | K.SRPNASGGAAC*SGPGPEPAVFCEPVVK. | 330 |
| C108 | | L | |
| Q8TDP1_ | RNASEH2C Ribonuclease H2 subunit | R.DAVPATLHLLPC*EVAVDGPAPVGR.F | 331 |
| C34 | C | | |
| Q13045_ | FLU Protein flightless-1 homolog | R.TGLC*YLPEELAALQK.L | 332 |
| C46 | | | |
| O95881_ | TXNDC12 Thioredoxin domain- | K.SWC*GACK.A | 333 |
| C66 | containing protein 12 | | |
| Q9Y296_ | TRAPPC4 Trafficking protein particle | R.C*ELFDQNLK.L | 334 |
| C195 | complex subunit 4 | | |
| Q00765_ | REEP5 Receptor expression- | K.NC*MTDLLAK.L | 335 |
| C18 | enhancing protein 5 | | |
| Q86X76_ | NIT1 Nitrilase homolog 1 | K.THLC*DVEIPGQGPMCESNSTMPGPSLES | 336 |
| C165 | | PVSTPAGK.I | |
| P52597_ | HNRNPF Heterogeneous nuclear | R.GLPFGC*TK.E | 337 |
| C122 | ribonucleoprotein F | | |
| Q96HE7_ | ERO1L ERO1-like protein alpha | R.CFC*QVSGYLDDCTCDVETIDR.F | 338 |
| C37 | | | |
| Q9BUH6_ | C9orf142 Uncharacterized protein | R.C*PGESLINPGFK.S | 339 |
| C180 | C9orf142 | | |
| Q13158_ | FADD Protein FADD | R.RVDDFEAGAAAGAAPGEEDLC*AAFNVI | 340 |
| C98 | | CDNVGK.D | |
| Q9UBE0_ | SAE1 SUMO-activating enzyme | K.KVVFC*PVK.E | 341 |
| C214 | subunit 1 | | |
| Q9P2J5_ | LARS Leucine--tRNA ligase, | K.NLETFC*EETR.R | 342 |
| C554 | cytoplasmic | | |
| Q96PU8_ | QK1 Protein quaking | K.LMSSLPNFC*GIFNHLER.L | 343 |
| C35 | | | |
| Q6XZF7_ | DNMBP Dynamin-binding protein | R.SLDQTSPC*PLVLVR.I | 344 |
| C691 | | | |
| Q9Y4R8_ | TELO2 Telomere length regulation | R.MDILDVLTLAAQELSRPGC*LGR.T | 345 |
| C628 | protein TEL2 homolog | | |
| Q9HBM1_ | SPC25 Kinetochore protein Spc25 | K.STDTSC*QMAGLR.D | 346 |
| C27 | | | |
| P21980_ | TGM2 Protein-glutamine gamma- | K.YGQC*WVFAAVACTVLR.C | 347 |
| C277 | glutamyltransferase 2 | | |
| Q9H3U1_ | UNC45A Protein unc-45 homolog A | RAIQTVSCLLQGPC*DAGNR.A | 348 |
| C426 | | | |
| Q9NRW3_ | APOBEC3C Probable DNA dC- dU- | R.LYYFQYPC*YQEGLR.S | 349 |
| C130 | editing enzyme APOBEC-3C | | |
| P55265_ | ADAR Double-stranded RNA-specific | K.NFYLC*PV | 350 |
| C1224 | adenosine deaminase | | |
| P48735_ | IDH2 Isocitrate dehydrogenase | K.SSGGFVWAC*K.N | 351 |
| C308 | | | |
| O60664_ | PLIN3 Perilipin-3 | R.VASMPLISSTC*DMVSAAYASTK.E | 352 |
| C39 | | | |
| Q9NYL9_ | TMOD3 Tropomodulin-3 | K.FC*NIMGSSNGVDQEHFSNVVK.G | 353 |
| C150 | | | |
| Q9HCC0_ | MCCC2 Methylcrotonoyl-CoA | K.NIAQIAVVMGSC*TAGGAYVPAMADENII | 354 |
| C216 | carboxylase beta chain, mitochondrial | VR.K | |
| Q16831_ | UPP1 Uridine phosphorylase 1 | R.IGTSGGIGLEYGTVVITEQAVDTC*FK.A | 355 |
| C162 | | | |
| O00244_ | ATOX1 Copper transport protein | K.HEFSVDMTC*GGCAEAVSR.V | 356 |
| C12 | ATOX1 | | |
| P11216_ | PYGB Glycogen phosphorylase, brain | R.TC*FEIFPDK.V | 357 |
| C326 | form | | |
| P42166_ | TMPO Lamina-associated polypeptide | R.NLFISC*K.S | 358 |
| C280 | 2, isoform alpha | | |
| O15372_ | EIF3H Eukaryotic translation | R.MDSLLIAGQINTYC*QNIK.E | 359 |
| C327 | initiation factor 3 subunit | | |
| Q9BRP1_ | PDCD2L Programmed cell death | R.LLHVFACAC*PGCSTGGAR.S | 360 |
| C82 | protein 2-like | | |
| Q15021_ | NCAPD2 Condensin complex subunit | K.VACC*PLER.C | 361 |
| C767 | 1 | | |
| P30042_ | C21orf33 ES1 protein homolog, | K.EFHQAGKPIGLCC*IAPVLAAK.V | 362 |
| C177 | mitochondrial | | |
| Q13425_ | SNTB2 Beta-2-syntrophin | R.LVHSGSGC*R.S | 363 |
| C391 | | | |
| O00159_ | MYO1C Unconventional myosin-1c | R.C*PENAFFLDHVR.T | 364 |
| C802 | | | |
| O95071_ | UBR5 E3 ubiquitin-protein ligase | R.C*ATTPMAVHR.V | 365 |
| C2267 | UBR5 | | |
| Q02809_ | PLOD1 Procollagen-lysine,2- | R.VGVDYEGGGC*R.F | 366 |
| C680 | oxoglutarate 5-dioxygenase 1 | | |
| Q96RE7_ | NACC1 Nucleus accumbens- | R.NTLANSC*GTGHLS | 367 |
| C416 | associated protein 1 | | |
| Q9UPQ0_ | LIMCH1 LIM and calponin homology | K.AANSC*TSYSGTTLNLKEFEGLLAQMR.K | 368 |
| C140 | domains-containing protein 1 | | |
| O14776_ | TCERG1 Transcription elongation | R.YLVLDC*VPEER.R | 369 |
| C1062 | regulator 1 | | |
| Q9H410_ | DSN1 Kinetochore-associated protein | K.VFDC*MELVMDELQGSVK.Q | 370 |
| C287 | DSNI homolog | | |
| Q12959_ | DLG1 Disks large homolog 1 | K.LLAVNNVC*LEEVTHEEAVTALK.N | 371 |
| C378 | | | |
| Q86UV5_ | USP48 Ubiquitin carboxyl-terminal | R.IWLEPC*IR.G | 372 |
| C39 | hydrolase 48 | | |
| P50454_ | SERPINH1 Serpin H1 | K.QHYNC*EHSK.I | 373 |
| C156 | | | |
| Q99798_ | ACO2 Aconitate hydratase, | R.DLGGIVLANACGPC*IGQWDR.K | 374 |
| C451 | mitochondrial | | |
| Q9P2T1_ | GMPR2 GMP reductase 2 | K.VGIGPGSVC*TTR.K | 375 |
| C186 | | | |
| Q9BTW9 | TBCD Tubulin-specific chaperone D | K.AGAPDEAVCGENVSQIYC*ALLGCMODY | 376 |
| C850 | | TTDSR.G | |
| Q8NFH5_ | NUP35 Nucleoporin NUP53 | R.C*ALSSPSLAFTPPIK.T | 377 |
| C255 | | | |
| P32322_ | PYCR1 Pyrroline-5-carboxylate | R.C*MTNTPVVVR.E | 378 |
| C120 | reductase 1, mitochondrial | | |
| P50851_ | LRBA Lipopolysaccharide-responsive | R.SLVNIPADGVTVDPALLPPAC*LGALGDL | 379 |
| C1704 | and beige-like anchor protein | SVEQPVQFR.S | |
| Q9UBR2_ | CTSZ Cathepsin Z | K.DQECDKFNQCGTC*NEFK.E | 380 |
| C173 | | | |
| Q8IWV8_ | UBR2 E3 ubiquitin-protein ligase | R.GNPLHLC*K.E | 381 |
| C1717 | UBR2 | | |
| O75369_ | FLNB Filamin-B | KIEC*SDNGDGTCSVSYLPTKPGEYFVNILF | 382 |
| C1087 | | EEVHIPGSPFK.A | |
| Q9Y4P1_ | ATG4B Cysteine protease ATG4B | K.NFPAIGGTGPTSDTGWGC*MLR.C | 383 |
| C74 | | | |
| Q8TD19_ | NEK9 Serine/threonine-protein kinase | R.LLTFGC*NK.C | 384 |
| C623 | Nek9 | | |
| Q9UMSO_ | NFU1 NFU1 iron-sulfur cluster | K.LQGSCTSC*PSSITILK.N | 385 |
| C213 | scaffold homolog, mitochondrial | | |
| O94953_ | KDM4B Lysine-specific demethylase | R.TEPYCAICTLFYPYC*QALQTEK.E | 386 |
| C694 | 4B | | |
| QI5149_ | PLEC Plectin | K.VLSSSGSEAAVPSVC*FLVPPPNQEAQEA | 387 |
| C992 | | VTR.L | |
| P14735_ | IDE Insulin-degrading enzyme | R.EMDSCPVVGEFPC*QNDINLSQAPALPQP | 388 |
| C974 | | EVIQNMTEFKR.G | |
| Q9NVG8_ | TBC1D13 TBC1 domain family | K.SLDDSQC*GITYK.M | 389 |
| C282 | member 13 | | |
| Q86TI2_ | DPP9 Dipeptidyl peptidase 9 | R.C*PESGEHYEVTLLHFLQEYL | 390 |
| C844 | | | |
| O94992_ | HEXIM1 Protein HEXIM1 | R.AFPQLGGRPGPEGEGSLESQPPPLQTQAC | 391 |
| C84 | | PESSC*LR.E | |
| Q86YH6_ | PDSS2 Decaprenyl-diphosphate | R.C*LLSDELSNIAMQVRX | 392 |
| C71 | synthase subunit 2 | | |
| P19447_ | ERCC3 TFIIH basal transcription | R.SGVIVLPC*GAGK.S | 393 |
| C342 | factor complex helicase | | |
| Q9Y3D2_ | MSRB2 Methionine-R-sulfoxide | K.YC*SGTGWPSFSEAHGTSGSDESHTGILR. | 394 |
| C105 | reductase B2, mitochondrial | R | |
| Q9P253_ | VPS18 Vacuolar protein sorting- | R.SAVLQPGC*PSVGIPHSGYVNAQLEK.E | 395 |
| C22 | associated protein 18 homolog | | |
| O75150_ | RNF40 E3 ubiquitin-protein ligase | R.EIQPC*LAESR.A | 396 |
| C890 | BREIB | | |
| P04818_ | TYMS Thymidylate synthase | R.DLPLMALPPCHALC*QFYVVNSELSCQLY | 397 |
| C199 | | QR.S | |
| Q00535_ | CDK5 Cyclin-dependent kinase 5 | R.C*YSAEVVTLWYRPPDVLFGAK.L | 398 |
| C157 | | | |
| Q96N67_ | DOCK7 Dedicator of cytokinesis | K.AVLPVTC*HR.D | 399 |
| C2125 | protein 7 | | |
| O95340_ | PAPSS2 Bifunctional 3- | R.VWGTTC*TK.H | 400 |
| C350 | phosphoadenosine 5-phosphosu1fate | | |
| Q96F86_ | EDC3 Enhancer of mRNA-decapping | R.IYLCDIGIPQQVFQEVGINYHSPFGC*K.F | 401 |
| C499 | protein 3 | | |
| Q6QNY0_ | BLOC1S3 Biogenesis of lysosome- | R.GDLC*ALAER.L | 402 |
| C168 | related organelles complex | | |
| Q7Z3B4_ | NUP54 Nucleoporin p54 | K.AVGYSC*MPSNICDEDGLVVLVFNK.K | 403 |
| C180 | | | |
| Q9UPT9_ | USP22 Ubiquitin carboxyl-terminal | R.KITSNC*TIGLR.G | 404 |
| C171 | hydrolase 22 | | |
| P45954_ | ACADSB Short/branched chain | K.VGSFC*LSEAGAGSDSFALK.T | 405 |
| C175 | specific acyl-CoA dehydrogenase | | |
| Q9UKT9_ | IKZF3 Zinc fmger protein Aiolos | R.SYELLKPPPIC*PR.D | 406 |
| C434 | | | |
| Q9NR50_ | EIF2B3 Translation initiation factor | K.EANTLNLAPYDAC*WNACR.G | 407 |
| C281 | eIF-2B subunit gamma | | |
| Q9HB90_ | RRAGC Ras-related GTP-binding | R.SC*GHQTSASSLK.A | 408 |
| C377 | protein C | | |
| Q5T0N5_ | FNBP1L Formin-binding protein 1- | R.FTSC*VAFFNILNELNDYAGQR.E | 409 |
| C69 | like | | |
| P07339_ | CTSD Cathepsin D | K.LLDIAC*WIHHK.Y | 410 |
| C117 | | | |
| Q7Z6Z7_ | HUWE1 E3 ubiquitin-protein ligase | K.AC*SPCSSQSSSSGICTDFWDLLVK.L | 411 |
| C3372 | HUWE1 | | |
| O00267_ | SUPT5H Transcription elongation | R.SFAFLHC*K.K | 412 |
| C626 | factor SPT5 | | |
| O95347_ | SMC2 Structural maintenance of | R.FTQC*QNGK.I | 413 |
| C1174 | chromosomes protein 2 | | |
| Q92616_ | GCN1L1 Translational activator | R.VLQEALC*VISGVPGLK.G | 414 |
| C648 | GCN1 | | |
| P85037_ | FOXK1 Forkhead box protein K1 | R.SMVSPVPSPTGTISVPNSC*PASPR.G | 415 |
| C254 | | | |
| P17655_ | CAPN2 Calpain-2 catalytic subunit | K.MPC*QLHQVIVAR.F | 416 |
| C640 | | | |
| P50851_ | LRBA Lipopolysaccharide-responsive | K.C*SGIGDNPGSETAAPR.A | 417 |
| C2675 | and beige-like anchor protein | | |
| O14733_ | MAP2K7 Dual specificity mitogen- | R.YQAEINDLENLGEMGSGTC*GQVWK.M | 418 |
| C131 | activated protein kinase | | |
| A6NED2_ | RCCD1 RCC1 domain-containing | R.GEPLWAQNVVPEAEGEDDPAGEAQAGR | 419 |
| C139 | protein 1 | LPLLPC*AR.A | |
| Q14980_ | NUMA1 Nuclear mitotic apparatus | R.QFC*STQAALQAMER.E | 420 |
| C961 | protein 1 | | |
| Q9NYL2_ | MLTK Mitogen-activated protein | K.FDDLQFFENC*GGGSFGSVYR.A | 421 |
| C22 | kinase kinase kinase MLT | | |
| Q13867_ | BLMH Bleomycin hydrolase | R.C*WIFSCLNVMR.L | 422 |
| C73 | | | |
| Q9BRJ7_ | NUDT16L1 Protein syndesmos | R.VLGLGLGC*LR.L | 423 |
| C88 | | | |
| Q96P48_ | ARAP1 Arf-GAP with Rho-GAP | R.AVFPEGPC*EEPLQLR.K | 424 |
| C900 | domain, ANK repeat and PH domain | | |
| | 1 | | |
| Q5MNZ6_ | WDR45L WD repeat domain | R.C*NYLALVGGGK.K | 425 |
| C63 | phosphoinositide-interacting protein 3 | | |
| Q13588_ | GRAP GRB2-related adapter protein | K.SPGAC*FAQAQFDFSAQDPSQLSFR.R | 426 |
| C161 | | | |
| H0Y2S0_ | Uncharacterized protein | R.YTQQGFGNLPIC*MAK.T | 427 |
| C31 | | | |
| Q9ULW0_ | TPX2 Targeting protein for Xklp2 | R.TVEIC*PFSFDSR.D | 428 |
| C536 | | | |
| Q9HAV4_ | XPO5 Exportin-5 | K.C*ALMEALVLISNQFK.N | 429 |
| C646 | | | |
| Q5T1V6_ | DDX59 Probable ATP-dependent | DDX59 K.NLPC*ANVR.Q | 430 |
| C414 | RNA helicase DDX59 | | |
| O14181_ | POLA2 DNA polymerase alpha | K.VLGC*PEALTGSYK.S | 431 |
| C198 | subunit B | | |
| Q8LZ73_ | RPUSD2 RNA pseudouridylate | R.LLAENEDVVVVDKPSSIPVHPC*GR.F | 432 |
| C246 | synthase domain-containing protein 2 | | |
| Q86UP2_ | KTN1 Kinectin | K.TMMFSEDEALC*VVDLLK.E | 433 |
| C303 | | | |
| Q9UGP4_ | LIMD1 LIM domain-containing | R.TPSVSAPLALSC*PR.Q | 434 |
| C305 | protein 1 | | |
| P32929_ | CTH Cystathionine gamma-lyase | K.YMNGHSDVVMGLVSVNC*ESLHNR.L | 435 |
| C229 | | | |
| Q7Z6Z7_ | HUWE1 E3 ubiquitin-protein ligase | R.HMLLLAIQEC*SEGFGLA.- | 436 |
| C4367 | HUWE1 | | |
| P31153_ | MAT2A S-adenosylmethionine | R.VHTIVISVQHDEEVC*LDEMR.D | 437 |
| C214 | synthase isoform type-2 | | |
| Q96NY7_ | CLIC6 Chloride intracellular channel | R.AGYDGESIGNC*PFSQR.L | 438 |
| C487 | protein 6 | | |
| P14635_ | CCNB1 G2/mitotic-specific cyclin-B1 | R.FMQNNC*VPK.K | 439 |
| C238 | | | |
| Q13303_ | KCNAB2 Voltage-gated potassium | R.EKVEVQLPELFHKIGVGAMTWSPLAC*GI | 440 |
| C248 | channel subunit beta-2 | VSGKYDSGIPPYSR.A | |
| Q9HAV4_ | XPO5 Exportin-5 | K.C*PICVPCGLR.L | 441 |
| C44 | | | |
| Q8ND24_ | RNF214 RING finger protein 214 | R.SSHAPATC*K.L | 442 |
| C655 | | | |
| Q9HB90_ | RRAGC Ras-related GTP-binding | R.KGLIDYNFHC*FR.K | 443 |
| C358 | protein C | | |
| Q92878_ | RAD50 DNA repair protein RAD50 | K.NIDQC*SEIVK.C | 444 |
| C1296 | | | |
| Q14149_ | MORC3 MORC family CW-type zinc | R.LSALC*PK.F | 445 |
| C15 | finger protein 3 | | |
| P13798_ | APEH Acylamino-acid-releasing | R.NPVINIASMLGSTDIPDWCVVEAGFPFSS | 446 |
| C641 | enzyme | DC*LPDLSVWAEMLDK.S | |
| Q01813_ | PFKP 6-phosphofructokinase type C | K.HEEFCVPMVMVPATVSNNVPGSDFSIGA | 447 |
| C563 | | DTALNTITDTC*DRIK.Q | |
| Q96T76_ | MMS19 MMS19 nucleotide excision | R.VGESNLTNGDEPTQC*SR.H | 448 |
| C549 | repair protein homolog | | |
| Q9BTE6_ | AARSD1 Alanyl-tRNA editing | R.VVNIEGVDSNMC*CGTHVSNLSDLQVIK.I | 449 |
| C209 | protein Aarsd1 | | |
| Q9C011_ | MTMR12 Myotubularin-related | R.HHSQQAPQAEAPC*LLR.N | 450 |
| C694 | protein 12 | | |
| P32320_ | CDA Cytidine deaminase | K.RPACTLKPEC*VQQLLVCSQEAK.K | 451 |
| C14 | | | |
| Q9P2E9_ | RRBP1 Ribosome-binding protein 1 | K.LTAEFEEAQTSAC.R.L | 452 |
| C1323 | | | |
| P30876_ | POLR2B DNA-directed RNA | R.DC*QIAHGAAQFLR.E | 453 |
| C1093 | polymerase H subunit RPB2 | | |
| P07237_ | P4HB Protein disulfide-isomerase | K.YLLVEFYAPWC*GHCK.A | 454 |
| C53 | | | |
| Q8IZ73_ | RPUSD2 RNA pseudouridylate | K.QSLDVLDLC*EGDLSPGLTDSTAPSSELG | 455 |
| C431 | synthase domain-containing protein 2 | KDDLEELAAAAQK.M | |
| Q6NZY4_ | ZCCHC8 Zinc finger CCHC domain- | R.IFGSIPMQAC*QQK.D | 456 |
| C393 | containing protein 8 | | |
| Q96EB1_ | ELP4 Elongator complex protein 4 | K.VEPC*SLTPGYTK.L | 457 |
| C218 | | | |
| O60568_ | PLOD3 Procollagen-lysine,2- | K.GLDYEGGGC*R.F | 458 |
| C691 | oxoglutarate 5-dioxygenase 3 | | |
| Q8WV74_ | NUDT8 Nucleoside diphosphate- | R.LAGLTC*SGAEGLARPK.Q | 459 |
| C207 | linked moiety X motif 8, | | |
| | mitochondrial | | |
| Q7Z6Z7_ | HUWE1 E3 ubiquitin-protein ligase | R.STDRLPSAHTC*FNQLDLPAYESFEK.L | 460 |
| C4341 | HUWE1 | | |
| P16455_ | MGMT Methylated-DNA--protein- | R.GNPVPILIPC*HR.V | 461 |
| C145 | cysteine methyltransferase | | |
| Q86X76_ | NIT1 Nitrilase homolog 1 | K.IGLAVC*YDMR.F | 462 |
| C203 | | | |
| Q9BR61_ | ACBD6 Acyl-CoA-binding domain- | R.DQDGCLPEEVTGC*K.T | 463 |
| C267 | containing protein 6 | | |
| Q8IU81_ | IRF2BP1 Interferon regulatory factor | R.EPAPAEALPQQYPEPAPAALC*GPPPRAP | 464 |
| C363 | 2-binding protein 1 | SR.N | |
| Q9Y5T5_ | USP16 Ubiquitin carboxyl-terminal | K.GLSNLGNTC*FFNAVMQNLSQTPVLR.E | 465 |
| C205 | hydrolase 16 | | |
| Q8IWZ3_ | ANKHD1 Ankyrin repeat and KH | R.AGHLC*TVQFLISK.G | 466 |
| C615 | domain-containing protein 1 | | |
| Q13158_ | FADD Protein FADD | R.RVDDFEAGAAAGAAPGEEDLCAAFNVIC | 467 |
| C105 | | *DNVGKDWRR.L | |
| P29590_ | PML Protein PML | R.GCSKPLCC*SCALLDSSHSELK.C | 468 |
| C213 | | | |
| Q00653_ | NFKB2 Nuclear factor NF-kappa-B | R.YGC*EGPSHGGLPGASSEK.G | 469 |
| C57 | p100 subunit | | |
| Q9BVA1_ | TUBB2B Tubulin beta-2B chain | K.ESESCDC*LQGFQLTHSLGGGTGSGMGT | 470 |
| C129 | | LLISK.I | |
| Q9NZA1_ | CLIC5 Chloride intracellular channel | K.AGIDGESIGNC*PFSQR.L | 471 |
| C191 | protein 5 | | |
| O60551_ | NMT2 Glycylpeptide N- | R.AMELLSAC*QGPAR.N | 472 |
| C104 | tetradecanoyltransferase 2 | | |
| Q16667_ | CDKN3 Cyclin-dependent kinase | R.VNC*SQFLGLCALPGCK.F | 473 |
| C39 | inhibitor 3 | | |
| A3KN83_ | SBNO1 Protein strawberry notch | K.NLC*PVGSSKPTK.T | 474 |
| C445 | homolog 1 | | |
| Q8N999_ | C12orf29 Uncharacterized protein | K.C*LFNHFLK.I | 475 |
| C302 | C12orf29 | | |
| Q6YN16_ | HSDL2 Hydroxysteroid | K.QHC*AYTIAK.Y | 476 |
| C166 | dehydrogenase-like protein 2 | | |
| Q9HB19_ | PLEKHA2 Pleckstrin homology | R.SISLTRPGSSSLSSGPNSILC*R.G | 477 |
| C332 | domain-containing family A member | | |
| | 2 | | |
| Q8WVV9_ | HNRPLL Heterogeneous nuclear | K.NIIQPPSCVLHYYNVPLC*VTEETFTK.L | 478 |
| C464 | ribonucleoprotein L-like | | |
| O75175_ | CNOT3 CCR4-NOT transcription | R.DIILSSTSAPPASAQPPLQLSEVNIPLSLGV | 479 |
| C600 | complex subunit 3 | C*PLGPVPLTK.E | |
| Q7L2J0_ | MEPCE 7SK snRNA | K.FQYGNYC*K.Y | 480 |
| C419 | methylphosphate capping enzyme | | |
| P36405_ | ARL3 ADP-ribosylation factor-like | R.VWQIQSCSALTGEGVQDGMNWVC*K.N | 481 |
| C174 | protein 3 | | |
| Q9Y4X0_ | AMMECR1 AMME syndrome | R.GC*IGTFSAMNLHSGLR.E | 482 |
| C175 | candidate gene 1 protein | | |
| Q9NZB2_ | FAM120A Constitutive coactivator of | K.GSQMGTVQPIPC*LLSMPTR.N | 483 |
| C531 | PPAR-gamma-like protein | | |
| P26358_ | DNMT1 DNA (cytosine-5)- | R.GVCSC*VEAGK.A | 484 |
| C1478 | methyltransferase 1 | | |
| Q8TB03_ | CXorf38 Uncharacterized protein | R.LNC*AEYK.N | 485 |
| C12 | CXorf38 | | |
| Q9Y676_ | MRPS18B 28S ribosomal protein | K.LLEQFVC*AHTGIIFYAPYTGVCVK.Q | 486 |
| C128 | S18b, mitochondrial | | |
| Q9Y613_ | FHOD1 FH1/FH2 domain-containing | R.TPQSPAPC*VLLR.A | 487 |
| C502 | protein 1 | | |
| Q99986_ | VRK1 Serine/threonine-protein kinase | K.VGLPIGQGGFGC*IYLADMNSSESVGSDA | 488 |
| C50 | VRK1 | PCVVK.V | |
| P53992_ | SEC24C Protein transport protein | R.APPSSGAPPASTAQAPC*GQAAYGQFGQ | 489 |
| C78 | Sec24C | GDVQNGPSSTVQMQR.L | |
| Q96RN5_ | MED15 Mediator of RNA polymerase | R.TFVPAMTAIHGPPITAPVVC*TR.K | 490 |
| C660 | II transcription subunit | | |
| Q27J81_ | INF2 Inverted formin-2 | R.AVLLASDAQEC*TLEEVVER.L | 491 |
| C332 | | | |
| Q27J81_ | INF2 Inverted formin-2 | K.QEEVC*VIDALLADIR.K | 492 |
| C971 | | | |
| Q9UBB4_ | ATXN10 Ataxin-10 | K.ETTNIFSNCGC*VR.A | 493 |
| C356 | | | |
| Q08378_ | GOLGA3 Golgin subfamily A | K.GEASSSNPATPIKIPDC*PVPASLLEELLRP | 494 |
| C1403 | member 3 | PPAVSKEPLK.N | |
| Q8WWI1_ | LMO7 LIM domain only protein 7 | R.DSGYGDIWC*PER.G | 495 |
| C228 | | | |
| P10398_ | ARAF Serine/threonine-protein kinase | R.TQADELPAC*LLSAAR.L | 496 |
| C597 | A-Raf | | |
| Q9NZ32_ | ACTR10 Actin-related protein 10 | R.IPDWC*SLNNPPLEMMFDVGK.T | 497 |
| C388 | | | |
| Q9Y2X3_ | NOP58 Nucleolar protein 58 | K.LNLSC*IHSPVVNELMR.G | 498 |
| C106 | | | |
| P53396_ | ACLY ATP-citrate synthase | R.LTKPIVCWCIGTCATMFSSEVQFGHAGAC | 499 |
| C764 | | *ANQASETAVAK.N | |
| P18124_ | RPL7 60S ribosomal protein L7 | K.YGIIC*MEDLIHENTVGK.R | 500 |
| C186 | | | |
| Q9BUK6_ | MST01 Protein misato homolog 1 | R.VAPPYPHLFSSC*SPPGMVLDGSPK.G | 501 |
| C485 | | | |
| O00541_ | PES1 Pescadillo homolog | K.AGEGTYALDSESC*MEK.L | 502 |
| C272 | | | |
| Q9Y277_ | VDAC3 Voltage-dependent anion- | K.VC*NYGLTFTQK.W | 503 |
| C65 | selective channel protein | | |
| Q02556_ | IRF8 Interferon regulatory factor 8 | R.VFCSGNAVVC*K.G | 504 |
| C306 | | | |
| Q01082_ | SPTBN1 Spectrin beta chain, non- | R.IHC*LENVDK.A | 505 |
| C112 | erythrocytic 1 | | |
| A2A288_ | ZC3H12D Probable ribonuclease | R.LAFSDDLGPLGPPLPVPAC*SLTPR.L | 506 |
| C367 | ZC3H12D | | |
| O14936_ | CASK Peripheral plasma membrane | R.HLEEAVELVC*TAPQWVPVSWVY | 507 |
| C914 | protein CASK | | |
| O43290_ | SART1 U4/U6.U5 tri-snRNP- | R.GLAAALLLC*QNK.G | 508 |
| C645 | associated protein 1 | | |
| Q9UBV8_ | PEF1 Peflin | K.QALVNC*NWSSFNDETCLMMINMFDK.T | 509 |
| C146 | | | |
| Q6PCB5_ | RSBN1L Round spermatid basic | K.SIQTIC*SGLLTDVEDQAAK.G | 510 |
| C280 | protein 1-like protein | | |
| Q08380_ | LGALS3BP Galectin-3-binding | K.STSSFPC*PAGHFNGFR.T | 511 |
| C561 | protein | | |
| P57737_ | CORO7 Coronin-7 | R.AGTAPSC*R.N | 512 |
| C34 | | | |
| Q92616_ | GCNIL1 Translational activator | R.C*GLALALNK.L | 513 |
| C1235 | GCN1 | | |
| P24468_ | NR2F2 COUP transcription factor 2 | K.AIVLFTSDAC*GLSDVAHVESLQEK.S | 514 |
| C326 | | | |
| Q96RP9_ | GFM1 Elongation factor G, | R.VLDGAVLVLCAVGGVQC*QTMTVNR.Q | 515 |
| C153 | mitochondrial | | |
| Q9NRF9_ | POLE3 DNA polymerase epsilon | R.AASVFVLYATSC*ANNFAMK.G | 516 |
| C51 | subunit 3 | | |
| P30837_ | ALDH1B1 Aldehyde dehydrogenase | R.HEPVGVC*GQIIPWNFPLVMQGWK.L | 517 |
| C179 | X, mitochondrial | | |
| Q8WUM4_ | PDCD6IP Programmed cell death 6- | K.FPFSENQIC*LTFTWK.D | 518 |
| C90 | interacting protein | | |
| Q9NP73_ | ALG13 UDP-N-acetylglucosamine | K.ADLVISHAGAGSC*LETLEK.G | 519 |
| C86 | transferase subunit ALG13 | | |
| P13667_ | PDIA4 Protein disulfide-isomerase A4 | K.EENGVLVLNDANFDNFVADKDTVLLEFY | 520 |
| C91 | | APWC*GHCK.Q | |
| P09884_ | POLA1 DNA polymerase alpha | R.YIFDAEC*ALEK.L | 521 |
| C1403 | catalytic subunit | | |
| O95833_ | CLIC3 Chloride intracellular channel | K.ASEDGESVGHC*PSCQR.L | 522 |
| C22 | protein 3 | | |
| Q9NTX5_ | ECHDC1 Ethylmalonyl-CoA | K.SLGTPEDGMAVC*MFMQNTLTR.F | 523 |
| C133 | decarboxylase | | |
| Q14289_ | PTK2B Protein-tyrosine kinase 2-beta | K.NELC*QLPPEGYVVVVK.N | 524 |
| C899 | | | |
| P49792_ | RANBP2 E3 SUMO-protein ligase | K.MIC*QQVEAIKKE | 525 |
| C815 | RanBP2 | | |
| Q14137_ | BOP1 Ribosome biogenesis protein | R.DLQPFPTC*QALVYR.G | 526 |
| C404 | BOP1 | | |
| Q15345_ | LRRC41 Leucine-rich repeat- | R.C*AAALMASR.R | 527 |
| C297 | containing protein 41 | | |
| Q99538_ | LGMN Legiunain | R.ESSYAC*YYDEK.R | 528 |
| C219 | | | |
| Q96EK4_ | THAP11 THAP domain-containing | R.AGVSGC*FSTFQPTTGHR.L | 529 |
| C48 | protein 11 | | |
| O60488_ | ACSL4 Long-chain-fatty-acid--CoA | K.GYDAPLC*NLLLFK.K | 530 |
| C420 | ligase 4 | | |
| Q96EY5_ | FAM125A Multivesicular body | K.SC*SPLAFSAFGDLTIK.S | 531 |
| C231 | subunit 12A | | |
| P22307_ | SCP2 Non-specific lipid-transfer | K.SGLTPNDEDVIELHDC*FSTNELLTYEALG | 532 |
| C307 | protein | LCPEGQGATLVDR.G | |
| Q969Z0_ | TBRG4 Protein TBRG4 | R.LATDLLSLMPSLTSGEVAHC*AK.S | 533 |
| C335 | | | |
| P46734_ | MAP2K3 Dual specificity mitogen- | R.ISC*MSKPPAPNPTPPR.N | 534 |
| C29 | activated protein kinase | | |
| Q5JPI3_ | C3orf38 Uncharacterized protein | K.FEQSDLEAFYNVITVC*GTNEVR.H | 535 |
| C308 | C3orf38 | | |
| Q9NRA8_ | EIF4ENIF1 Eukaryotic translation | R.DAVLPEQSPGDFDFNEFFNLDKVPC*LAS | 536 |
| C318 | initiation factor 4E transporter | MIEDVLGEGSVSASR.F | |
| Q15648_ | MED1 Mediator of RNA polymerase | K.VAHHGENPVSC*PELVQQLR.E | 537 |
| C135 | II transcription subunit | | |
| Q8IZ69_ | TRMT2A tRNA (uracil-5-)- | R.VIGVELC*PEAVEDAR.V | 538 |
| C463 | methyltransferase homolog A | | |
| Q04206_ | RELA Transcription factor p65 | R.YKC*EGR.S | 539 |
| C38 | | | |
| O15533_ | TAPBP Tapasin | K.WASGLTPAQNC*PR.A | 540 |
| C115 | | | |
| Q9UNI6_ | DUSP12 Dual specificity protein | R.VSC*AGQMLEVQPGLYEGGAAAVAEPD | 541 |
| C23 | phosphatase 12 | HLR.E | |
| Q9BUP3_ | HTATIP2 Oxidoreductase HTATIP2 | R.YSVFRPGVLLC*DR.Q | 542 |
| C172 | | | |
| P53384_ | NUBP1 Cytosolic Fe-S cluster | K.LPIIGVVENMSGFIC*PK.C | 543 |
| C235 | assembly factor NUBP1 | | |
| Q7Z5K2_ | WAPAL Wings apart-like protein | R.LENINEAIEEDIVQSVLRPTNC*R.T | 544 |
| C293 | homolog | | |
| Q9Y5S2_ | CDC42BPB Serine/threonine-protein | R.IRPLNSEGTLNLLNC*EPPR.L | 545 |
| C1517 | kinase MRCK beta | | |
| Q15024_ | EXOSC7 Exosome complex | K.GVVTC*MR.K | 546 |
| C238 | component RRP42 | | |
| P40855_ | PEX19 Permdsomal biogenesis factor | R.VGSDMTSQQEFTSC*LK.E | 547 |
| C128 | 19 | | |
| Q15910_ | EZH2 Histone-lysine N- | R.LWAAHC*R.K | 548 |
| C503 | methyltransferase EZH2 | | |
| Q15149_ | PLEC Plectin | K.FLEGTSC*IAGVFVDATK.E | 549 |
| C4071 | | | |
| P22307_ | SCP2 Non-specific lipid-transfer | R.AIYHSLGMTGIPIINVNNNC*ATGSTALFM | 550 |
| C94 | protein | AR.Q | |
| Q12789_ | GTF3C1 General transcription factor | R.VPPFPLPLEPC*TQEFLWR.A | 551 |
| C42 | 3C polypeptide 1 | | |
| Q15796_ | SMAD2 Mothers against | K.CVTIPSTC*SEIWGLSTPNTIDQWDTTGLY | 552 |
| C81 | decapentaplegic homolog 2 | SFSEQTR.S | |
| Q9UL15_ | BAGS BAG family molecular | K.TELQGLIGQLDEVSLEICNPC*IR.E | 553 |
| C327 | chaperone regulator 5 | | |
| Q8N9T8_ | KRI1 Protein KRI1 homolog | R.LLGPTVMLGGC*EFSR.Q | 554 |
| C673 | | | |
| Q9Y679_ | AUP1 Ancient ubiquitous protein 1 | K.TGC*VDLTTTNLLEGAVAFMPEDITK.G | 555 |
| C391 | | | |
| O14733_ | MAP2K7 Dual specificity mitogen- | K.LC*DFGISGR.L | 556 |
| C260 | activated protein kinase | | |
| O75179_ | ANKRD17 Ankyrin repeat domain- | R.AGHVC*TVQFLISK.G | 557 |
| C644 | containing protein 17 | | |
| P31323_ | PRKAR2B cAMP-dependent protein | R.LLGPC*MEINK.R | 558 |
| C388 | kinase type II-beta regulatory subunit | | |
| Q9HBL8_ | NMRAL1 NmrA-like family domain- | R.LPC*YFENLLSHFLPQK.A | 559 |
| C154 | containing protein 1 | | |
| Q96RU2_ | USP28 Ubiquitin carboxyl-terminal | K.NVGNTC*WFSAVIQSLFQLPEFR.R | 560 |
| C171 | hydrolase 28 | | |
| Q96T76_ | MMS19 MMS19 nucleotide excision | R.ELLELSCCHSC*PFSSTAAAK.C | 561 |
| C750 | repair protein homolog | | |
| P17858_ | PFKL 6-phosphofructokinase, liver | R.C*KAFTTR.E | 562 |
| C89 | type | | |
| Q96F07_ | CYFIP2 Cytoplasmic FMR1- | R.LCC*GLSMFEVILTR.I | 563 |
| C1112 | interacting protein 2 | | |
| P42695_ | NCAPD3 Condensin-2 complex | R.C*VMAMLR.R | 564 |
| C541 | subunit D3 | | |
| Q9Y2S7_ | POLDIP2 Polymerase delta- | R.DC*PHISQR.S | 565 |
| C143 | interacting protein 2 | | |
| P52948_ | NUP98 Nuclear pore complex protein | R.WLSC*TATPQIEEEVSLTQK.N | 566 |
| C1312 | Nup98-Nup96 | | |
| Q9UER7_ | DAXX Death domain-associated | K.IC*TLPSPPSPLASLAPVADSSTR.V | 567 |
| C664 | protein 6 | | |
| Q9H4L7_ | SMARCAD1 SWI/SNF-related | K.NTEMC*NVMMQLR.K | 568 |
| C772 | matrix-associated actin-dependent | | |
| Q9Y570_ | PPME1 Protein phosphatase | R.FAEPIGGFQC*VFPGC | 569 |
| C381 | methylesterase 1 | | |
| P52701_ | MSH6 DNA mismatch repair protein | K.TFFGDDFIPNDILIGC*EEEEQENGK.A | 570 |
| C1117 | Msh6 | | |
| P33992_ | MCM5 DNA replication licensing | R.C*SVLAAANSVFGR.W | 571 |
| C482 | factor MCM5 | | |
| E2QRD5_ | C15orf38-AP3S2 Protein C15orf38- | K.C*NFTGDGK.T | 572 |
| C183 | AP3S2 | | |
| Q16877_ | PFKFB4 6-phosphofructo-2- | K.TFFVESIC*VDPEVIAANIVQVK.L | 573 |
| C159 | kinase/fructose-2,6-bisphosphatase 4 | | |
| Q9BSQ5_ | CCM2 Malcavernin | K.VAAEELCC*LLGQVFQVVYTESTIDFLDR. | 574 |
| C211 | | A | |
| Q00013_ | MPP1 55 kDa erythrocyte membrane | K.K.DNLIPC*K.E | 575 |
| C179 | protein | | |
| Q6UWP2_ | DHRS11 Dehydrogenase/reductase | K.C*LKPEDVAEAVIYVLSTPAHIQIGDIQMR | 576 |
| C226 | SDR family member 11 | PTEQVT | |
| Q8N556_ | AFAP1 Actin filament-associated | K.SQAAPGSSPC*R.G | 577 |
| C713 | protein 1 | | |
| Q9NXJ5_ | PGPEP1 Pyroglutamyl-peptidase 1 | R.YLC*DFTYYTSLYQSHGR.S | 578 |
| C149 | | | |
| Q8IYS1_ | PM20D2 Peptidase M20 domain- | MRPGGERPVEGGAC*NGR.S | 579 |
| C14 | containing protein 2 | | |
| Q92878_ | RAD50 DNA repair protein RAD50 | K.TTIIEC*LK.Y | 580 |
| C48 | | | |
| Q68CZ2_ | TNS3 Tensin-3 | R.SC*PETLTHAVGMSESPIGPK.S | 581 |
| C888 | | | |
| O75592_ | MYCBP2 Probable E3 ubiquitin- | R.C*SILSPELALPTGSR.A | 582 |
| C1131 | protein ligase MYCBP2 | | |
| Q5VUA4_ | ZNF318 Zinc finger protein 318 | K.LSPQAC*SFTK.A | 583 |
| C1860 | | | |
| Q9H3M7_ | TXN1P Thioredoxin-interacting | K.VSC*MFIPDGR.V | 584 |
| C170 | protein | | |
| Q92619_ | HMHA1 Minor histocompatibility | R.C*EGGVDAALLYAK.N | 585 |
| C278 | protein HA-1 | | |
| P46013_ | MKI67 Antigen KI-67 | K.SEETNTEIVEC*ILK.R | 586 |
| C903 | | | |
| Q9UI30_ | TRMT112 tRNA methyltransferase | K.GPVEGYEENEEFLRTMHHLLLEVEVIEGT | 587 |
| C100 | 112 homolog | LQC*PESGR.M | |
| Q92797_ | SYMPK Symplekin | R.GMGMNSPELLLLVENC*PK.G | 588 |
| C848 | | | |
| P50990_ | CCT8 T-complex protein 1 subunit | R.NIQAC*K.E | 589 |
| C36 | theta | | |
| O76075_ | DFFB DNA fragmentation factor | R.VLGSMC*QR.L | 590 |
| C194 | subunit beta | | |
| P04150_ | NR3C1 Glucocorticoid receptor | K.LGTVYC*QASFPGANIIGNK.M | 591 |
| C302 | | | |
| Q96JH7_ | VCPIP1 Deubiquitinating protein | K.SQECLIPVHVDGDGHC*LVHAVSR.A | 592 |
| C219 | VCIP135 | | |
| Q8NEC7_ | GSTCD Glutathione S-transferase C- | K.AC*AEVSQWTR.L | 593 |
| C140 | terminal domain-containing | | |
| P48200_ | IREB2 Iron-responsive element- | K.C*AIQNAPNPGGGDLQK.A | 594 |
| C137 | binding protein 2 | | |
| Q8WTW3_ | COG1 Conserved oligomeric Golgi | K.AQAISPC*VQNFCSALDSK.L | 595 |
| C513 | complex subunit 1 | | |
| Q9BYX2_ | TBC1D2 TBC1 domain family | R.TQNC*FLNSEIHQVTK.I | 596 |
| C469 | member 2A | | |
| P51991_ | HNRNPA3 Heterogeneous nuclear | R.GFGFVTYSC*VEEVDAAMCAR.P | 597 |
| C85 | ribonucleoprotein A3 | | |
| Q5UIP0_ | RIF1 Telomere-associated protein | K.ESIPCPTESVYPPLVNC*VAPVDIILPQITS | 598 |
| C2298 | RIF1 | NMWAR.G | |
| Q5T440_ | IBA57 Putative transferase CAF17, | R.VWAVLPSSPEAC*GAASLQER.A | 599 |
| C170 | mitochondrial | | |
| P46821_ | MAP 1B Microtubule-associated | R.KSC*FWK.L | 600 |
| C293 | protein 1B | | |
| Q9BT09_ | CNPY3 Protein canopy homolog 3 | K.QC*DVLVEEFEEVIEDWYR.N | 601 |
| C166 | | | |
| Q8IXB1_ | DNAJC10 DnaJ homolog subfamily C | K.ESVNSHVTTLGPQNFPANDKEPWLVDFF | 602 |
| C480 | member 10 | APWC*PPCR.A | |
| O00622_ | CYR61 Protein CYR61 | K.C*APGVGLVR.D | 603 |
| C39 | | | |
| Q69YN2_ | CWF19L1 CWF19-like protein 1 | K.QILAPVEESAC*QFFFDLNEK.Q | 604 |
| C288 | | | |
| Q8TEX9_ | IPO4 Importin-4 | K.LLEC*PHLNVR.K | 605 |
| C708 | | | |
| Q9Y6W3_ | CAPN7 Calpain-7 | R.AHFPLGANPFLERPQSFISPQSC*DAQGQR. | 606 |
| C197 | | Y | |
| Q9Y6Y8_ | SEC23IP SEC23-interacting protein | K.C*PGPLAVANGVVK.Q | 607 |
| C604 | | | |
| Q9ULX6_ | AKAP8L A-kinase anchor protein 8- | R.GQC*MSGASR.L | 608 |
| C211 | like | | |
| Q13630_ | TSTA3 GDP-L-fucose synthase | K.VVSCLSTC*IFPDK.T | 609 |
| C116 | | | |
| P13667_ | PDIA4 Protein disulfide-isomerase A4 | K.DTVLLEFYAPWCGHC*K.Q | 610 |
| C94 | | | |
| Q5T1V6_ | DDX59 Probable ATP-dependent | K.LFKPPVLVFVDC*K.L | 611 |
| C453 | RNA helicase DDX59 | | |
| Q9GZR2_ | REXO4 RNA exonuclease 4 | K.ILGLQVQQAEHC*SIQDAQAAMR.L | 612 |
| C382 | | | |
| Q8WXD5_ | GEMIN6 Gem-associated protein 6 | K.LMHLFTSGDC*K.A | 613 |
| C91 | | | |
| Q15118_ | PDK1 | K.QFLDFGSVNAC*EK.T | 614 |
| C71 | | | |
| Q8WXE1_ | ATRIP ATR-interacting protein | RFQC*VFQVLPKC | 615 |
| C585 | | | |
| Q8N2W9_ | PIAS4 E3 SUMO-protein ligase | R.VSLIC*PLVK.M | 616 |
| C326 | PIAS4 | | |
| Q14141_ | SEPT6 Septin-6 | R.QYPWGTVQVENEAHC*DFVK.L | 617 |
| C269 | | | |
| P26358_ | DNMT1 DNA (cytosine-5)- | R.CTVEYGEDLPEC*VQVYSMGGPNR.F | 618 |
| C1071 | methyltransferase 1 | | |
| Q8IYQ7_ | THNSL1 Threonine synthase-like 1 | R.LGEMIETAYGENFAC*SK.I | 619 |
| C324 | | | |
| P49419_ | ALDH7A1 Alpha-aminoadipic | R.STC*TINYSK.D | 620 |
| C522 | semialdehyde dehydrogenase | | |
| Q9ULJ3_ | ZNF295 Zinc finger protein 295 | K.TPQAPFPTC*PNR.K | 621 |
| C129 | | | |
| Q9HB19_ | PLEKHA2 Pleckstrin homology | K.C*EQDREPLR.T | 622 |
| C232 | domain-containing family A member | | |
| | 2 | | |
| O76031_ | CLPX ATP-dependent Clp protease | K.C*ELNVTEDALK.A | 623 |
| C538 | ATP-binding subunit clp | | |
| Q01581_ | HMGCS1 Hydroxymethylglutaryl- | K.TNLMQLFEESGNTDIEGIDTTNAC*YGGT | 624 |
| C129 | CoA synthase, cytoplasmic | AAVFNAVNWIESSSWDGR.Y | |
| Q96RS6_ | NUDCD1 NudC domain-containing | R.LMHLTSEELNPNPDKEKPPC*NAQELEEC | 625 |
| C402 | protein 1 | DIFFEESSSLCR.F | |
| Q9UL45_ | PLDN Pallidin | K.FKEC*HSMLDINALFAEAK.H | 626 |
| C95 | | | |
| Q9HAU4_ | SMURF2 E3 ubiquitin-protein ligase | R.LFTIHQIDAC*TNNLPK.A | 627 |
| C706 | SMURF2 | | |
| Q8TCG1_ | KIAA1524 Protein CIP2A | K.C*LEPTVALLR.W | 628 |
| C337 | | | |
| Q9P0K7_ | RAI14 Ankycorbin | K.QILTMC*K.N | 629 |
| C973 | | | |
| Q7Z2Z2_ | EFTUD1 Elongation factor Tu GTP- | R.ICDGCIIVVDAVEGVC*PQTQAVLR.Q | 630 |
| C124 | binding domain-containing protein 1 | | |
| Q5JTD0_ | TJAP1 Tight junction-associated | R.NSPLPNC*TYATR.Q | 631 |
| C350 | protein 1 | | |
| Q15022_ | SUZ12 Polycomb protein SUZ12 | R.LQLLDGEYEVAMQEMEEC*PISK.K | 632 |
| C325 | | | |
| P30837_ | ALDH1B1 Aldehyde dehydrogenase | K.SPSIVLADADMEHAVEQCHEALFFNMGQ | 633 |
| C320 | X, mitochondrial | CCC*AGSR.T | |
| Q9H0L4_ | CSTF2T Cleavage stimulation factor | K.LC*VQNSHQEAR.N | 634 |
| C150 | subunit 2 tau variant | | |
| Q03I69_ | TNFAIP2 Tumor necrosis factor | K.GLANVFC*VFTK.G | 635 |
| C45 | alpha-induced protein 2 | | |
| Q9UBB4_ | ATXN10 Ataxin-10 | R.VIHVAGKETTNIFSNC*GCVR.A | 636 |
| C354 | | | |
| Q06187_ | BTK Tyrosine-protein kinase BTK | K.QRPIFIITEYMANGC*LLNYLR.E | 637 |
| C481 | | | |
| Q96N21_ | ENTHD2 AP-4 complex accessory | R.ALC*AIASLGSSDLLPQEHILLR.T | 638 |
| C302 | subunit tepsin | | |
| Q92878_ | RAD50 DNA repair protein RAD50 | R.SMVC*TQK.S | 639 |
| C102 | | | |
| Q7Z401_ | DENND4A C-myc promoter-binding | R.LKQGC*EIIQSTPYGRPANISGSTSSQR.I | 640 |
| C117 | protein | | |
| Q9H307_ | PNN Pinin | RMC*PATQK.L | 641 |
| C249 | | | |
| Q96DF8_ | DGCR14 Protein DGCR14 | R.C*QLQQAAALNAQHK.Q | 642 |
| C263 | | | |
| Q7L8W6_ | ATPBD4 ATP-binding domain- | K.C*EGDEVEDLYELLK.L | 643 |
| C88 | containing protein 4 | | |
| Q13232_ | NME3 Nucleoside diphosphate kinase | R.ADELLC*WEDSAGHWLYE | 644 |
| C158 | 3 | | |
| Q9NWA0_ | MED9 Mediator of RNA polymerase | K.SLC*MFEIPKE | 645 |
| C139 | II transcription subunit | | |
| Q9BZ67_ | FRMD8 FERM domain-containing | R.VQLGPYQPGRPAAC*DLR.E | 646 |
| C191 | protein 8 | | |
| P51617_ | IRAK1 Interleulcin-1 receptor- | R.SWHLTPSC*PLDPAPLR.E | 647 |
| C608 | associated kinase 1 | | |
| Q9Y4W2_ | LAS1L Ribosomal biogenesis protein | K.C*LAQEVNIPDWIVDLR.H | 648 |
| C140 | LAS1L | | |
| Q9NX18_ | SDHAF2 Succinate dehydrogenase | R.GMLENC*ILLSLFAK.E | 649 |
| C83 | assembly factor 2, mitochondrial | | |
| Q969H6_ | POP5 Ribonuclease P/MRP protein | R.SC*LLEEEEESGEEAAEAME | 650 |
| C146 | subunit POP5 | | |
| Q96IV0_ | NGLY1 Peptide-N(4)-(N-acetyl-beta- | R.C*GEWANCFTLCCR.A | 651 |
| C309 | glucosaminyl)asparagin | | |
| P42575_ | CASP2 Caspase-2 | R.SDMICGYAC*LK.G | 652 |
| C370 | | | |
| P51812_ | RPS6KA3 Ribosomal protein S6 | K.EDIGVGSYSVC*K.R | 653 |
| C436 | kinase alpha-3 | | |
| P09086_ | POU2F2 POU domain, class 2, | R.VWFC*NR.R | 654 |
| C346 | transcription factor 2 | | |
| Q8IWV7_ | UBR1 E3 ubiquitin-protein ligase | RNSLIELPDDYSC*LLNQASIEFRC | 655 |
| C1603 | UBR1 | | |
| Q9H0W8_ | SMG9 Protein SMG9 | RREDFC*PRK | 656 |
| C380 | | | |
| O96017_ | CHEK2 Serine/threonine-protein | KTLGSGAC*GEVKL | 657 |
| C231 | kinase Chk2 | | |
| Q96RU3_ | FNBP1 Formin-binding protein 1 | K.KNSKEEEEYKYTSC*K.A | 658 |
| C70 | | | |
| O95347_ | SMC2 Structural maintenance of | KKNLAC*EESKR | 659 |
| C326 | chromosomes protein 2 | | |
| O15357_ | INPPL1 Phosphatidylinositol 3,4,5- | RKPAFTEASC*PLSRL | 660 |
| C926 | trisphosphate 5-phosphatase 2 | | |
| Q8N5L8_ | RPP25L Ribonuclease P protein | R.DPLDPNEC*GYQPPGAPPGLGSMPSSSCG | 661 |
| C131 | subunit p25-like protein | PR.S | |
| Q9C0I1_ | MTMR12 Myotubularin-related | RVFQFC*LRY | 662 |
| C152 | protein 12 | | |
| Q96F86_ | EDC3 Enhancer of xnRNA-decapping | K.SQDVAVSPQQQQC*SK.S | 663 |
| C137 | protein 3 | | |
| O60443_ | DFNA5 Non-syndromic hearing | R.FWC*WQRPK.Y | 664 |
| C45 | impairment protein 5 | | |
| Q9NU22_ | MDN1 Midasin | K.LIC*QHIVPGNVK.S | 665 |
| C1011 | | | |
| Q14204_ | DYNC1H1 Cytoplasmic dynein 1 | K.VWLQYQC*LWDMQAENIYNR.L | 666 |
| C1059 | heavy chain 1 | | |
| Q09472_ | EP300 Histone acetyltransferase p300 | R.C*IQSLVHACQCR.N | 667 |
| C1738 | | | |
| P12532_ | CKMT1B Creatine kinase U-type, | R.LGYILTC*PSNLGTGLR.A | 668 |
| C316 | mitochondrial | | |
| Q9P2X3_ | IMPACT Protein IMPACT | R.STFQAHLAPVVC*PK.Q | 669 |
| C195 | | | |
| Q92667_ | AKAP1 A-kinase anchor protein 1, | K.SIPLEC*PLSSPK.G | 670 |
| C147 | mitochondrial | | |
| O14879_ | IFIT3 Interferon-induced protein with | R.VLESTPNNGYLYHQIGC*CYK.A | 671 |
| C283 | tetratricopeptide | | |
| Q01201_ | RELB Transcription factor Relb | R.GAASLSTVTLGPVAPPATPPPWGC*PLGR. | 672 |
| C109 | | L | |
| Q9UPN9_ | TRIM33 E3 ubiquitin-protein ligase | R.GNMNC*GAFQAHQMR.L | 673 |
| C582 | TRIM33 | | |
| Q9BSD7_ | NTPCR Cancer-related nucleoside- | R.VC*VIDEIGK.M | 674 |
| C110 | triphosphatase | | |
| Q8IV53_ | DENND1C DENN domain-containing | R.GNSKPLSC*FVAPDSGR.L | 675 |
| C174 | protein 1C | | |
| Q99798_ | ACO2 Aconitate hydratase, | R.VGLIGSC*TNSSYEDMGR.S | 676 |
| C385 | mitochondrial | | |
| Q14204_ | DYNC1H1 Cytoplasmic dynein 1 | R.C*VLNWFGDWSTEALYQVGKEFTSK.M | 677 |
| C3089 | heavy chain 1 | | |
| P49903_ | SEPHS1 Selenide, water dikinase 1 | R.FTELKGTGC*K.V | 678 |
| C31 | | | |
| Q7OCQ2_ | USP34 Ubiquitin carboxyl-terminal | R.TGDFLGETIGNELFNC*R.Q | 679 |
| C741 | hydrolase 34 | | |
| O43439_ | CBFA2T2 Protein CBFA2T2 | R.FSNGPASSTSSALTNQQLPATC*GAR.Q | 680 |
| C111 | | | |
| Q9BWH6_ | RPAP1 RNA polymerase II- | R.C*GQGTLLAQACQDLPSIR.N | 681 |
| C1039 | associated protein 1 | | |
| Q6AI12_ | ANKRD40 Ankyrin repeat domain- | R.TPESTICPGPVC*QPPVSQSR.S | 682 |
| C209 | containing protein 40 | | |
| Q5GLZ8_ | HERC4 Probable E3 ubiquitin-protein | R.HTVFVLDDGTVYTCGC*NDLGQLGHEK. | 683 |
| C60 | ligase HERC4 | S | |
| Q9Y5A7_ | NUB1 NEDD8 ultimate buster 1 | R.LECC*ENEVEK.V | 684 |
| C52 | | | |
| Q6PJG6_ | BRAT1 BRCA1-associated ATM | R.TQAFQVLLQPLAC*VLK.A | 685 |
| C326 | activator 1 | | |
| Q6PJG6_ | BRAT1 BRCA1-associated ATM | R.THC*PYAVALPEVAPAQPLTEALR.A | 686 |
| C673 | activator 1 | | |
| Q8NB90_ | SPATA5 Spermatogenesis-associated | K.GVLLYGPPGC*SK.T | 687 |
| C672 | protein 5 | | |
| Q9ULT8_ | HECTD1 E3 ubiquitin-protein ligase | K.LLQLSC*NGNVK.S | 688 |
| C1855 | HECTD1 | | |
| Q9NUI1_ | DECR2 Peroxisomal 2,4-dienoyl-CoA | R.HLFC*PDLLR.D | 689 |
| C22 | reductase | | |
| Q9P0V9_ | SEPT10 Septin-10 | RQYPWGVVQVENENHC*DFVKL | 690 |
| C293 | | | |
| Q8WX93_ | PALLD Palladin | K.VSSC*EQR.L | 691 |
| C964 | | | |
| Q9Y4B4_ | RAD54L2 Helicase ARIP4 | R.AGC*LGVNLIGANR.V | 692 |
| C820 | | | |
| P41226_ | UBA7 Ubiquitin-like modifier- | R.APASAAASEDAPYPVC*TVR.Y | 693 |
| C599 | activating enzyme 7 | | |
| Q9BZQ6_ | EDEM3 ER degradation-enhancing | R.VPC*GFAAMK.D | 694 |
| C441 | alpha-mannosidase-like 3 | | |
| P52732_ | KIF11 Kinesin-like protein KIF11 | R.SVVC*PILDEVIMGYNCTIFAYGQTGTGK. | 695 |
| C87 | | T | |
| P14598_ | NCF1 Neutrophil cytosol factor 1 | R.C*SESTK.R | 696 |
| C378 | | | |
| Q9UL40_ | ZNF346 Zinc finger protein 346 | K.NQC*LFTNTQCK.V | 697 |
| C68 | | | |
| Q9C0C9_ | UBE2O Ubiquitin-conjugating | K.NC*AQGEGSMAK.K | 698 |
| C375 | enzyme E2 O | | |
| O14733_ | MAP2K7 Dual specificity mitogen- | R.SAGC*AAYMAPER.I | 699 |
| C280 | activated protein kinase | | |
| O95239_ | KIF4A Chromosome-associated | R.GLLC*LGNVISALGDDKK.G | 700 |
| C269 | kinesin KIF4A | | |
| Q8WYP5_ | AHCTF1 Protein ELYS | R.C*LVAGLLSPR.F | 701 |
| C521 | | | |
| Q93074_ | MED12 Mediator of RNA polymerase | K.TPQLNPC*QSDGNKPTVGIR.S | 702 |
| C1188 | II transcription subunit 12 | | |
| Q16610_ | ECM1 Extracellular matrix protein 1 | R.AC*PSHQPDISSGLELPFPPGVPTLDNIK.N | 703 |
| C284 | | | |
| O00622_ | CYR61 Protein CYR61 | K.HQCTCIDGAVGCIPLC*PQELSLPNLGCPN | 704 |
| C134 | | PR.L | |
| Q2VPK5_ | CTU2 Cytoplasmic tRNA 2-thiolation | R.TPPGPC*CSPGVGWAQR.C | 705 |
| C433 | protein 2 | | |
| Q9UI10_ | EIF2B4 Translation initiation factor | R.AHNVPVLVCCETYKFC*ER.V | 706 |
| C444 | eIF-2B subunit delta | | |
| Q9UPW5_ | AGTPBP1 Cytosolic | RLTSPLEYNLPSSLLDFENDLIESSC*KV | 707 |
| C1164 | carboxypeptidase 1 | | |
| Q13613_ | MTMR1 Myotubularin-related protein | KDVMYIC*PFMGAVSGTLTVTDFKL | 708 |
| C117 | I | | |
| O00541_ | PES1 Pescadillo homolog | K.SLC*IGATYDVTDSR.I | 709 |
| C361 | | | |
| P39877_ | PLA2G5 Calcium-dependent | K.VTGKNALTNYGFYGC*YCGWGGR.G | 710 |
| C46 | phospholipase A2 | | |
| Q14207_ | NPAT Protein NPAT | K.SEETTVPFPEESIVPAAKPC*HR.R | 711 |
| C1059 | | | |
| P42704_ | LRPPRC Leucine-rich PPR motif- | R.AILQENGC*LSDSDMFSQAGLR.S | 712 |
| C500 | containing protein, mitochondrial | | |
| Q9Y5R8_ | TRAPPC1 Trafficking protein particle | K.NPLC*PLGQTVQSELFR.S | 713 |
| C115 | complex subunit 1 | | |
| O60566_ | BUB1B Mitotic checkpoint | K.IPGMTLSSSVCQVNCC*AR.E | 714 |
| C504 | serine/threonine-protein kinase | | |
| Q5T440_ | IBA57 Putative transferase CAF17, | K.GC*YIGQELTAR.T | 715 |
| C259 | mitochondrial | | |
| Q5TGY3_ | AHDC1 AT-hook DNA-binding | R.GPAAAAAGYGC*PLLSDLTLSPVPR.D | 716 |
| C1540 | motif-containing protein 1 | | |
| P43403_ | ZAP70 Tyrosine-protein kinase ZAP- | R.PSGLEPQPGVFDC*LR.D | 717 |
| C117 | 70 | | |
| P07602_ | PSAP Proactivator polypeptide | KHC*LQTVWNKPTVK.S | 718 |
| C48 | | | |
| Q93074_ | MED12 Mediator of RNA polymerase | K.C*QEATAGFTIGR.V | 719 |
| C444 | II transcription subunit 12 | | |
| Q96FA3_ | PELI1 E3 ubiquitin-protein ligase | R.QEINAARPQC*PVGFNTLAFPSMK.R | 720 |
| C282 | pellino homolog 1 | | |
| Q8IY17_ | PNPLA6 Neuropathy target esterase | R.LAYVSC*VR.Q | 721 |
| C1199 | | | |
| Q8IY18_ | SMC5 Structural maintenance of | K.SSIVC*AICLGLAGKPAFMGR.A | 722 |
| C91 | chromosomes protein 5 | | |
| Q9NTJ3_ | SMC4 Structural maintenance of | R.FSC*IIGPNGSGK.S | 723 |
| C110 | chromosomes protein 4 | | |
| Q07065_ | CKAP4 Cytoskeleton-associated | K.SSSSSSASAAAAAAAASSSASC*SR.R | 724 |
| C100 | protein 4 | | |
| P51812_ | RPS6KA3 Ribosomal protein S6 | R.QGYDAAC*DIWSLGVLLYTMLTGYTPFA | 725 |
| C599 | kinase alpha-3 | NGPDDTPEEILAR.I | |
| Q86U44_ | METTL3 N6-adenosine- | K.GNPQGFNQGLDC*DVIVAEVR.S | 726 |
| C500 | methyltransferase 70 kDa subunit | | |
| Q9H479_ | FN3K Fructosamine-3-kinase | R.AFGGPGAGC*ISEGR.A | 727 |
| C24 | | | |
| Q9UPT9_ | USP22 Ubiquitin carboxyl-terminal | R.AIYQC*FVWSGTAEAR.K | 728 |
| C44 | hydrolase 22 | | |
| P30042_ | C21orf33 ES1 protein homolog, | K.VVTTPAFMC*ETALHYIHDGIGAMVR.K | 729 |
| C244 | mitochondrial | | |
| Q8NFY9_ | KBTBD8 Kelch repeat and BTB | R.IQGLAAVYKDSIYYIAGTC*GNHQR.M | 730 |
| C490 | domain-containing protein 8 | | |
| Q9UHQ1_ | NARF Nuclear prelamin A | K.VLVVSVC*PQSLPYFAAK.F | 731 |
| C99 | recognition factor | | |
| Q15042_ | RAB3GAP1 Rab3 GTPase-activating | K.IGC*PLTPLPPVSIAIR.F | 732 |
| C218 | protein catalytic subunit | | |
| Q9H0E9_ | BRD8 Bromodomain-containing | K.LC*LASSVMR.S | 733 |
| C26 | protein 8 | | |
| P51878_ | CASP5 Caspase-5 | K.VIIVQAC*R.G | 734 |
| C315 | | | |
| Q9UPQ9_ | TNRC6B Trinucleotide repeat- | R.SYRPTHPDC*QAVLQTLLSR.T | 735 |
| C600 | containing gene 6B protein | | |
| P27540_ | ARNT Aryl hydrocarbon receptor | K.MTAYITELSDMVPTC*SALAR.K | 736 |
| C119 | nuclear translocator | | |
| Q96C01_ | FAM136A Protein FAM136A | R.C*HVPLAQAQALVTSELEK.F | 737 |
| C57 | | | |
| Q9NQZ5_ | STARD7 StAR-related lipid transfer | R.YC*VSWMVSSGMPDFLEK.L | 738 |
| C302 | protein 7, mitochondria+ | | |
| Q9H9P8_ | L2HGDH L-2-hydroxyglutarate | K.AC*FLGATVK.Y | 739 |
| C376 | dehydrogenase, mitochondria+ | | |
| Q8NBX0_ | SCCPDH Saccharopine | R.WPISYC*R.E | 740 |
| C238 | dehydrogenase-like oxidoreductase | | |
| Q8NFF5_ | FLAD1 FAD synthase | R.TDPYSCSLC*PFSPTDPGWPAFMR.I | 741 |
| C499 | | | |
| Q6PJG6_ | BRAT1 BRCA1-associated ATM | R.C*QSPWTEALWVR.L | 742 |
| C228 | activator 1 | | |
| Q9C0C2_ | TNKS1BP1 182 kDa tankyrase-1- | K.DLQSEFGITGDPQPSSFSPSSWC*QGASQ | 743 |
| C749 | binding protein | DYGLOGASPR.G | |
| Q9Y4C1_ | KDM3A Lysine-specific demethylase | K.IVDPSLIHVEVVHDNLVTC*GNSAR.I | 744 |
| C251 | 3A | | |
| Q8N5C7_ | DTWD1 DTW domain-containing | K.IFTDERLQGLLQVELICTRKTC*FWRHQK. | 745 |
| C235 | protein 1 | G | |
| Q9BVP2_ | GNL3 Guanine nucleotide-binding | K.KLYC*QELK.K | 746 |
| C131 | protein-like 3 | | |
| Q6ZS81_ | WDFY4 WD repeat- and FYVE | R.DGKEPQPSAEAAAAPSLANISC*FTQK.L | 747 |
| C1963 | domain-containing protein 4 | | |
| O94829_ | IPO13 Importin-13 | R.TSLAVECGAVFPLLEQLLQQPSSPSC*VR. | 748 |
| C217 | | Q | |
| Q9BRT3_ | MIEN1 Migration and invasion | R.IVVEYCEPC*GFEATYLELASAVK.E | 749 |
| C33 | enhancer 1 | | |
| Q9BRJ7_ | NUDT16L1 Protein syndesmos | K.C*QLLFALK.V | 750 |
| C171 | | | |
| Q96NE9_ | FRMD6 FERM domain-containing | R.KLIYYTGC*PMR.S | 751 |
| C306 | protein 6 | | |
| Q70CQ2_ | USP34 Ubiquitin carboxyl-terminal | R.LATSAYDGC*SNSELCGMDQFWGIALR.A | 752 |
| C1090 | hydrolase 34 | | |
| O00622_ | CYR61 Protein CYR61 | TQPCDHTKK.TQPC*DHTK.G | 753 |
| C70 | | | |
| Q6VMQ6_ | ATF7IP Activating transcription | K.LCALQC*AVFDK.T | 754 |
| C612 | factor 7-interacting protein 1 | | |
| P68371_ | TUBB4B Tubulin beta-4B chain | K.VSDTVVEPYNATLSVHQLVENTDETYC*I | 755 |
| C213 | | DNEALYDIC*FR.T | |
| P04150_ | NR3C1 Glucocorticoid receptor | R.QSSANLLC*FAPDLIINEQR.M | 756 |
| C622 | | | |
| Q8WVB6_ | CHTF18 Chromosome transmission | R.SGEEEAAQPLGAPEEEPTDGQDASSHC*L | 757 |
| C280 | fidelity protein 18 homolog | WVDEFAPR.H | |
| Q7Z401_ | DENND4A C-myc promoter-binding | R.LWSSPAFSPTC*PFR.E | 758 |
| C1289 | protein | | |

[0548] Table 2 illustrates an exemplary list of liganded cysteines which are identified from isoTOP-ABPP experiments performed in situ. Table 2 further shows the accession number (or the protein identifier) of the protein, cysteine residue number, and an illustrative peptide fragment containing the cysteine of interest (denoted by C*).

TABLE 2

| | | | SEQ ID |
|---|---|---|---|
| Identifier | Protein Name | Illustrative Cysteine Fragment | NO: |
| P04406_ | GAPDH Glyceraldehyde-3-phosphate | K.IISNASC*TTNCLAPLAK.V | 759 |
| C152 | dehydrogenase | | |
| P61978_ | HNRNPK Heterogeneous nuclear | K.IIPTLEEGLQLPSPTATSQLPLESDAVE | 760 |
| C132 | ribonucleoprotein K | C*LNYQHYK.G | |
| Q13526_ | PIN1 Peptidyl-prolyl cis-trans | K.IKSGEEDFESLASQFSDC*SSAK.A | 761 |
| C113 | isomerase NIMA-interacting 1 | | |
| P24752_ | ACAT1 Acetyl-CoA acetyltransferase, | R.QAVLGAGLPISTPC*TTINK.V | 762 |
| C119 | mitochondrial | | |
| P24752_ | ACAT1 Acetyl-CoA acetyltransferase, | K.QGEYGLASIC*NGGGGASAMLIQK.L | 763 |
| C413 | mitochondrial | | |
| Q9NUY8_ | TBC1D23 TBC1 domain family member | K.FLENTPSSLNIEDIEDLFSLAQYYC*S | 764 |
| C283 | 23 | K.T | |
| P13667_ | PDIA4 Protein disulfide-isomerase A4 | K.ENFDEVVNDADIILVEFYAPWC*GHC | 765 |
| C206 | | K.K | |
| P12268_ | IMPDH2 Inosine-5-monophosphate | R.HGFC*GIPITDTGR.M | 766 |
| C140 | dehydrogenase 2 | | |
| Q15365_ | PCBP1 Poly(rC)-binding protein 1 | R.VMTIPYQPMPASSPVIC*AGGQDR.C | 767 |
| C194 | | | |
| Q9NVC6_ | MED17 Mediator of RNA polymerase II | K.MELLMSALSPC*LL | 768 |
| C649 | transcription subunit | | |
| P42166_ | TMPO Lamina-associated polypeptide | K.VDDEILGFISEATPLGGIQAASTESC* | 769 |
| C561 | 2, isoform alpha | NQQLDLALCR.A | |
| Q9Y696_ | CLIC4 Chloride intracellular channel | K.AGSDGESIGNC*PFSQR.L | 770 |
| C35 | protein 4 | | |
| P10599_ | TXN Thioredoxin | K.LVVVDFSATWC*GPCK.M | 771 |
| C32 | | | |
| P31943_ | HNRNPH1 Heterogeneous nuclear | R.DLNYC*FSGMSDHR.Y | 772 |
| C267 | ribonucleoprotein H | | |
| Q86SX6_ | GLRX5 Glutaredoxin-related protein | K.GTPEQPQC*GFSNAVVQILR.L | 773 |
| C67 | 5, mitochondrial | | |
| P15121_ | AKR1B1 Aldose reductase | R.VC*ALLSCTSHK.D | 774 |
| C299 | | | |
| P52597_ | HNRNPF Heterogeneous nuclear | R.DLSYC*LSGMYDHR.Y | 775 |
| C267 | ribonucleoprotein F | | |
| Q9ULV4_ | CORO1C Coronin-1C | K.KC*DLISIPK.K | 776 |
| C420 | | | |
| P62888_ | RPL30 60S ribosomal protein L30 | R.VC*TLAIIDPGDSDIIR.S | 777 |
| C92 | | | |
| Q9NQR4_ | NIT2 Omega-amidase NIT2 | R.VGLGIC*YDMR.F | 778 |
| C153 | | | |
| P42765_ | ACAA2 3-ketoacyl-CoA thiolase, | R.LC*GSGFQSIVNGCQEICVK.E | 779 |
| C92 | mitochondrial | | |
| Q15084_ | PDIA6 Protein disulfide-isomerase | R.EVIQSDSLWLVEFYAPWC*GHCQR.L | 780 |
| C55 | A6 | | |
| Q96HE7_ | ERO1L ERO1-like protein alpha | K.RPLNPLASGQGTSEENTFYSWLEGLC | 781 |
| C241 | | *VEK.R | |
| Q99439_ | CNN2 Calponin-2 | K.AGQC*VIGLQMGTNK.C | 782 |
| C164 | | | |
| P25205_ | MCM3 DNA replication licensing factor | R.TLTSC*FLSCVVCVEGIVTK.C | 783 |
| C119 | MCM3 | | |
| Q9NS86_ | LANCL2 LanC-like protein 2 | R.SVVC*QESDLPDELLYGR.A | 784 |
| C187 | | | |
| Q15233_ | NONO Non-POU domain-containing | R.FAC*HSASLTVR.N | 785 |
| C145 | octamer-binding protein | | |
| Q9BRA2_ | TXNDC17 Thioredoxin domain- | K.SWC*PDCVQAEPVVR.E | 786 |
| C43 | containing protein 17 | | |
| P35611_ | ADD1 Alpha-adducin | R.VSMILQSPAFC*EELESMIQEQFK.K | 787 |
| C68 | | | |
| O75521_ | ECI2 Enoyl-CoA delta isomerase 2, | R.WLSDEC*TNAVVNFLSR.K | 788 |
| C380 | mitochondrial | | |
| Q9BXW7_ | CECR5 Cat eye syndrome critical | R.DLC*FSPGLMEASHVVNDVNEAVQL | 789 |
| C392 | region protein 5 | VFR.K | |
| P30101_ | PDIA3 Protein disulfide-isomerase | K.SEPIPESNDGPVKVVVAENFDEIVNN | 790 |
| C406 | A3 | ENKDVLIEFYAPWC*GHCK.N | |
| Q96AB3_ | ISOC2 Isochorismatase domain- | R.SVLLCGIEAQAC*ILNTTLDLLDR.G | 791 |
| C114 | containing protein 2, mitochondrial | | |
| P13667_ | PDIA4 Protein disulfide-isomerase | K.KDVLIEFYAPWC*GHCK.Q | 792 |
| C555 | A4 | | |
| Q09161_ | NCBP1 Nuclear cap-binding protein | K.SAC*SLESNLEGLAGVLEADLPNYK. | 793 |
| C44 | subunit 1 | S | |
| P78417_ | GSTO1 Glutathione S-transferase | R.FC*PFAER.T | 794 |
| C32 | omega-1 | | |
| Q9ULW0_ | TPX2 Targeting protein for Xklp2 | R.TVEIC*PFSFDSR.D | 795 |
| C536 | | | |
| Q9NRG0_ | CHRAC1 Chromatin accessibility | K.ATELFVQC*LATYSYR.H | 796 |
| C55 | complex protein 1 | | |
| Q96T76_ | MMS19 MMS19 nucleotide excision | R.LMGLLSDPELGPAAADGFSLLMSDC | 797 |
| C848 | repair protein homolog | *TDVLTR.A | |
| Q8TAQ2_ | SMARCC2 SWI/SNF complex subunit | K.SLVQNNCLSRPNIFLC*PEIEPK.L | 798 |
| C145 | SMARCC2 | | |
| Q9BVC5_ | C2orf49 Ashwin | R.SC*TDSELLLHPELLSQEFLLLTLEQK. | 799 |
| C10 | | N | |
| Q7Z2W4_ | ZC3HAV1 Zinc finger CCCH-type | K.NSNVDSSYLESLYQSC*PR.G | 800 |
| C645 | antiviral protein 1 | | |
| Q9BQ69_ | MACROD1 O-acetyl-ADP-ribose | K.LEVDAIVNAANSSLLGGGGVDGC*IH | 801 |
| C186 | deacetylase MACRODI | R.A | |
| Q16831_ | UPP1 Uridine phosphorylase 1 | R.IGTSGGIGLEPGTVVITEQAVDTC*FK. | 802 |
| C162 | | A | |
| P30101_ | PDIA3 Protein disulfide-isomerase | R.ISDTGSAGLMLVEFFAPWC*GHCK.R | 803 |
| C571 | A3 | | |
| P12268_ | IMPDH2 Inosine-5-monophosphate | R.VGMGSGSIC*ITQEVLACGRPQATAV | 804 |
| C331 | dehydrogenase 2 | YK.V | |
| O95571_ | ETHE1 Protein ETHE1, mitochondrial | R.TDFQQGC*AK.T | 805 |
| C170 | | | |
| O00299_ | CLIC1 Chloride intracellular channel | K.IGNC*PFSQR.L | 806 |
| C24 | protein 1 | | |
| O14879_ | IFIT3 Interferon-induced protein | K.GLNPLNAYSDLAEFLETEC*YQTPFN | 807 |
| C343 | with tetratricopeptide | K.E | |
| Q96CM8_ | ACSF2 Acyl-CoA synthetase family | R.MVSTPIGGLSYVQGC*TK.K | 808 |
| C64 | member 2, mitochondrial | | |
| P51946_ | CCNH Cyclin-H | R.TC*LSQLLDIMK.S | 809 |
| C244 | | | |
| P49588_ | AARS Alanine-tRNA ligase, | K.C*LSVMEAK.V | 810 |
| C773 | cytoplasmic | | |
| Q96RN5_ | MED15 Mediator of RNA polymerase II | K.QQYLC*QPLLDAVLANIR.S | 811 |
| C618 | transcription subunit | | |
| O15294_ | OGT UDP-N-acetylglucosarnine-peptide | K.C*PDGGDNADSSNTALNMPVIPMNTI | 812 |
| C758 | N-acetylglucosaminyl transferase | AEAVIEMINR.G | |
| P46734_ | MAP2K3 Dual specificity mitogen- | K.MC*DEGISGYLVDSVAK.T | 813 |
| C207 | activated protein kinase | | |
| Q96S55_ | WRNIP1 ATP ase WRNIP1 | R.SLLETNELPSLILWGPPGC*GK.T | 814 |
| C272 | | | |
| O95229_ | ZWINT ZW10 interactor | K.LLC*SQLQVADFLQNILAQEDTAK.G | 815 |
| C54 | | | |
| O60610_ | DIAPH1 Protein diaphanous homolog 1 | K.AGC*AVTSLLASELTK.D | 816 |
| C1227 | | | |
| Q13428_ | TCOF1 Treacle protein | K.C*FLAQPVTLLDIYTHWQQTSELGR. | 817 |
| C38 | | K | |
| Q9Y277_ | VDAC3 Voltage-dependent anion- | K.VC*NYGLTFTQK.W | 818 |
| C65 | selective channel protein | | |
| P57764_ | GSDMD Gasdermin-D | R.C*LHNFLTDGVPAEGAFTEDFQGLR. | 819 |
| C268 | | A | |
| Q9Y3A3_ | MOB4 MOB-like protein phocein | R.HTLDGAAC*LLNSNK.Y | 820 |
| C134 | | | |
| Q02252_ | ALDH6A1 Methylmalonate-semialdehyde | R.C*MALSTAVLVGEAKIC | 821 |
| C317 | dehydrogenase | | |
| Q9NYL9_ | TMOD3 Tropomodulin-3 | K.VSLDPELEEALTSASDTELC*DLAAIL | 822 |
| C132 | | GMHNLITNTK.F | |
| P83731_ | RPL24 60S ribosomal protein L24 | K.VELC*SFSGYK.I | 823 |
| C6 | | | |
| O95336_ | PGLS 6-phosphogluconolactonase | R.AAC*CLAGAR.A | 824 |
| C32 | | | |
| Q13155_ | AIMP2 Aminoacyl tRNA synthase | K.SPWLAGNELTVADVVLWSVLQQIGG | 825 |
| C291 | complex-interacting multif | C*SVTVPANVQR.W | |
| Q13418_ | ILK Integrin-linked protein kinase | K.FSFQC*PGR.M | 826 |
| C346 | | | |
| A6NDU8_ | C5orf51 UPF0600 protein C5orf51 | R.C.PIQLNEGVSFQDLDTAK.L | 827 |
| C179 | | | |
| Q9UKF6_ | CPSF3 Cleavage and polyadenylation | R.NFNYHILSPC*DLSNYTDLAMSTVK. | 828 |
| C498 | specificity factor subunit | Q | |
| Q96F86_ | EDC3 Enhancer of mRNA-decapping | K.DLPTSPVDLVINCLDC*PENVFLR.D | 829 |
| C413 | protein 3 | | |
| P42224_ | STAT1 Signal transducer and | R.NLSFFLTPPC*AR.W | 830 |
| C492 | activator of transcription 1 | | |
| P11216_ | PYGB Glycogen phosphorylase, brain | R.TC*FETFPDK.V | 831 |
| C326 | form | | |
| P21980_ | TGM2 Protein-glutamine gamma- | K.YGQC*WVFAAVACTVLR.C | 832 |
| C277 | glutamyltransferase 2 | | |
| Q9HAV7_ | GRPEL1 GrpE protein homolog 1, | K.ATQC*VPKEEIICDDNPIILK.N | 833 |
| C124 | mitochondrial | | |
| P24752_ | ACAT1 Acetyl-CoA acetyltransferase, | K.VC*ASGMK.A | 834 |
| C126 | mitochondrial | | |
| Q9NQ88_ | TIGAR Fructose-2,6-bisphosphatase | K.EADQKEQFSQGSPSNC*LETSLAEIFP | 835 |
| C161 | TIGAR | LGK.N | |
| Q13155_ | AIMP2 Aminoacyl tRNA synthase | R.VELPTC*MYR.L | 836 |
| C23 | complex-interacting multif | | |
| Q9NQW6_ | ANLN Actin-binding protein anillin | K.NNAFPC*QVNIK.Q | 837 |
| C712 | | | |
| P51649_ | ALDH5A1 Succinate-semialdehyde | R.NTGQTC*VCSNQFLVQR.G | 838 |
| C340 | dehydrogenase, mitochondrial | | |
| Q15021_ | NCAPD2 Condensin complex subunit 1 | K.NAIQLLASFLANNPFSC*K.L | 839 |
| C439 | | | |
| Q5T0N5_ | FNBP1L Formin-binding protein 1-like | R.FTSC*VAFFNILNELNDYAGQR.E | 840 |
| C69 | | | |
| P38606_ | ATP6V1A V-type proton ATPase | KMDFTPC*K.N | 841 |
| C138 | catalytic subunit A | | |
| Q9HCC0_ | MCCC2 Methylcrotonoyl-CoA | K.NIAQIAVVMGSC*TAGGAYVPAMAD | 842 |
| C216 | carboxylase beta chain, mitoch | ENTIVR.K | |
| Q9NQC3_ | RTN4 Reticulon-4 | K.YSNSALGHVNC*TIK.E | 843 |
| C1101 | | | |
| P35754_ | GLRX Glutaredoxin-1 | K.VVVFIKPTC*PYCR.R | 844 |
| C23 | | | |
| Q99757_ | TXN2 Thioredoxin, mitochondrial | R.VVNSETPVVVDFHAQWC*GPCK.I | 845 |
| C90 | | | |
| Q9Y3D0_ | FAM96B Mitotic spindle-associated | R.VQVSDPESTVAVAFTPTIPHC*SMAT | 846 |
| C93 | MMXD complex subunit MI | LIGLSIK.V | |
| Q9UMS0_ | NFU1 NFU1 iron-sulfur cluster | K.LQGSCTSC*PSSIITLK.N | 847 |
| C213 | scaffold homolog, mitochondrial | | |
| Q9NXV6_ | CDKN2AIP CDKN2A-interacting protein | K.SVYLGTGC*GK.S | 848 |
| C516 | | | |
| Q96RS6_ | NUDCD1 NudC domain-containing | R.DSAQC*AAIAER.L | 849 |
| C376 | protein 1 | | |
| Q14997_ | PSME4 Proteasome activator complex | K.QQFTDDQLLVLTDLLVSPC*YYA | 850 |
| C1840 | subunit 4 | | |
| P50570_ | DNM2 Dynamin-2 | K.LQDAFSSIGQSC*HLDLPQIAVVGGQ | 851 |
| C27 | | SAGK.S | |
| Q86YH6_ | PDSS2 Decaprenyl-diphosphate | R.C*LLSDELSNIAMQVR.K | 852 |
| C71 | synthase subunit 2 | | |
| Q99497_ | PARK7 Protein DJ-1 | K.GLIAAIC*AGPTALLAHEIGFGSK.V | 853 |
| C106 | | | |
| Q9UJW0_ | DCTN4 Dynactin subunit 4 | R.LLQPDFQPVC*ASQLYPR.H | 854 |
| C258 | | | |
| Q9BUH6_ | C9orf142 Uncharacterized protein | R.C*PGESLINPGFK.S | 855 |
| C180 | C9orf142 | | |
| P24752_ | ACAT1 Acetyl-CoA acetyltransferase, | K.IHMGSC*AENTAK.K | 856 |
| C196 | mitochondrial | | |
| Q13162_ | PRDX4 Peroxiredoxin-4 | R.EEEC*HFYAGGQVYPGEASR.V | 857 |
| C51 | | | |
| Q9BTA9_ | WAC WW domain-containing adapter | R.STC*SLTPALAAHFSENLIK.H | 858 |
| C553 | protein with coiled-coil | | |
| P48643_ | CCT5 T-complex protein 1 subunit | K.IAILTC*PFEPPKPK.T | 859 |
| C253 | epsilon | | |
| O75362_ | ZNF217 Zinc finger protein 217 | R.C*IPQLDPFTTFQAWQLATK.G | 860 |
| C286 | | | |
| O60825_ | PFKFB2 6-phosphofructo-2-kinase/ | K.VFFVESVC*DDPDVIAANILEVK.V | 861 |
| C158 | fructose-2,6-bisphosphatase 2 | | |
| Q8NBS9_ | TXNDC5 Thioredoxin domain-containing | K.FYAPWC*GHCK.T | 862 |
| C350 | protein 5 | | |
| Q9NYL2_ | MLTK Mitogen-activated protein kinase | K.FDDLQFFENC*GGGSFGSVYR.A | 863 |
| C22 | kinase kinase MLT | | |
| P27707_ | DCK Deoxycytidine kinase | R.SC*PSFSASSEGTR.I | 864 |
| C9 | | | |
| Q93009_ | USP7 Ubiquitin carboxyl-terminal | K.NQGATC*YMNSLLQTLFFTNQLR.K | 865 |
| C223 | hydrolase 7 | | |
| O14929_ | HAT1 Histone acetyltransferase type | K.VDENFDC*VEADDVEGKJ | 866 |
| C101 | B catalytic subunit | | |
| Q9UPQ0_ | LIMCH1 LIM and calponin homology | K.AANSC*TSYSGTTLNLK.E | 867 |
| C140 | domains-containing protein | | |
| Q96NY7_ | CLIC6 Chloride intracellular channel | R.AGYDGESIGNC*PFSQR.L | 868 |
| C487 | protein 6 | | |
| Q9NQ88_ | TIGAR Fructose-2,6-bisphosphatase | R.EEC*PVFTPPGGETLDQVK.M | 869 |
| C114 | TIGAR | | |
| Q14790_ | CASP8 Caspase-8 | K.VFFIQAC*QGDNYQK.G | 870 |
| C360 | | | |
| P04183_ | TK1 Thymidine kinase, cytosolic | K.LFAPQQILQC*SPAN.- | 871 |
| C230 | | | |
| P68366_ | TUBA4A Tubulin alpha-4A chain | K.TIGGGDDSFTTFFC*ETGAGK.H | 872 |
| C54 | | | |
| Q13428_ | TCOF1 Treacle protein | K.GAGNPQASTLALQSNITQC*LLGQP | 873 |
| C1298 | | WPLNEAQVQASVVK.V | |
| Q5MNZ6_ | WDR45L WD repeat domain | R.C*NYLALVGGGK.K | 874 |
| C63 | phosphoinositide-interacting protein | | |
| O14980_ | XPO1 Exportin-1 | K.DLLGLC*EQK.R | 875 |
| C528 | | | |
| Q86W42_ | THOC6 THO complex subunit 6 homolog | R.LHMTIFSQSVSPC*GK.F | 876 |
| C35 | | | |
| Q9Y6G9_ | DYNC1LI1 Cytoplasmic dynein 1 light | R.VGSFGSSPPGLSSTYTGGPLGNEIASG | 877 |
| C51 | intermediate chain 1 | NGGAAAGDDEDGQNLWSC*ILSEVSTR | |
| | | .S | |
| Q9NY27_ | PPP4R2 Serine/threonine-protein | K.EVC*PVLDQFLCHVAK.T | 878 |
| C22 | phosphatase 4 regulatory | | |
| Q8NFH5_ | NUP35 Nucleoporin NUP53 | R.C*ALSSPSLAFTPPIK.T | 879 |
| C255 | | | |
| Q9Y676_ | MRPS18B 28S ribosomal protein S18b, | K.LLEQFVC*AHTGIIFYAPYTGVCVK.Q | 880 |
| C128 | mitochondrial | | |
| P35658_ | NUP214 Nuclear pore complex protein | K.AC*FQVGTSEEMK.M | 881 |
| C728 | Nup214 | | |
| Q9NTX5_ | ECHDC1 Ethylmalonyl-CoA | K.SLGTPEDGMAVC*MFMQNTLTR.F | 882 |
| C133 | decarboxylase | | |
| Q15118_ | PDK1 | K.QFLDFGSVNAC*EK.T | 883 |
| C71 | | | |
| Q00765_ | REEP5 Receptor expression-enhancing | K.NC*MTDLLAK.L | 884 |
| C18 | protein 5 | | |
| P22307_ | SCP2 Non-specific lipid-transfer | K.ALADAQIPYSAVDQACVGYVFGDST | 885 |
| C71 | protein | C*GQR.A | |
| O75521_ | ECI2 Enoyl-CoA delta isomerase 2, | K.KLTAGEAC*AQGLVTEVFPDSTFQK. | 886 |
| C312 | mitochondrial | E | |
| P49189_ | ALDH9A1 4- | K.GALMANFLTQGQVC*CNGTR.V | 887 |
| C288 | trimethylaminobutyraldehyde | | |
| | dehydrogenase | | |
| Q5T440_ | IBA57 Putative transferase CAF17, | R.VWAVLPSSPEAC*GAASLQER.A | 888 |
| C170 | mitochondrial | | |
| Q15084_ | PDIA6 Protein disulfide-isomerase A6 | K.DVIELTDDSFDKNVLDSEDVWMVEF | 889 |
| C190 | | YAPWC*GHCK.N | |
| Q96C19_ | EFHD2 EF-hand domain-containing | K.AAAGELQEDSGLC*VLAR.L | 890 |
| C172 | protein D2 | | |
| P22061_ | PCMT1 Protein-L-isoaspartate | R.MVGC*TGK.V | 891 |
| C102 | (D-aspartate) O-methyltransferase | | |
| Q9NP73_ | ALG13 UDP-N-acetylglucosamine | K.ADLVISHAGAGSC*LETLEK.G | 892 |
| C86 | transferase subunit ALG13 | | |
| Q9BRF8_ | CPPED1 Calcineurin-like | K.AWSTGDC*DNGGDEWEQEIR.L | 893 |
| C54 | phosphoesterase domain-containing | | |
| Q6ICB0_ | DESI1 Desumoylating isopeptidase 1 | R.GEAYNLFEHNC*NTFSNEVAQFLTGR | 894 |
| C108 | | .K | |
| P29590_ | PML Protein PML | R.LQDLSSC*ITQGK.D | 895 |
| C389 | | | |
| P07858_ | CTSB Cathepsin B | K.IC*EPGYSPTYK.Q | 896 |
| C211 | | | |
| Q9NX18_ | SDHAF2 Succinate dehydrogenase | R.GMLENC*ILLSLFAK.E | 897 |
| C83 | assembly factor 2, mitochondrial | | |
| P46109_ | CRKL Crk-like protein | K.RVPC*AYDK.T | 898 |
| C249 | | | |
| P45984_ | MAPK9 Mitogen-activated protein | R.TAC*INFMMTPYVVTR.Y | 899 |
| C177 | kinase 9 | | |
| P19447_ | ERCC3 TFIIH basal transcription | R.SGVIVLPC*GAGK.S | 900 |
| C342 | factor complex helicase | | |
| P42166_ | TMPO Lamina-associated polypeptide | K.SGIQPLC*PER.S | 901 |
| C341 | 2, isoform alpha | | |
| Q8N1F7_ | NUP93 Nuclear pore complex protein | K.SSGQSAQLLSHEPGDPPC*LR.R | 902 |
| C522 | Nup93 | | |
| Q86UY8_ | NT5DC3 5-nucleotidase domain- | K.YIC*YAEQTR.A | 903 |
| C276 | containing protein 3 | | |
| Q8WWI1_ | LMO7 LIM domain only protein 7 | R.DSGYGDIWC*PER.G | 904 |
| C228 | | | |
| Q9NWA0_ | MED9 Mediator of RNA polymerase II | K.SLC*MFEIPKE | 905 |
| C139 | transcription subunit | | |
| P09110_ | ACAA1 3-ketoacyl-CoA thiolase, | K.VNPLGGAVALGHPLGC*TGAR.Q | 906 |
| C381 | peroxisomal | | |
| Q2NL82_ | TSR1 Pre-rRNA-processing protein | R.DTGTVHLNELGNTQNFMLLC*PR.L | 907 |
| C126 | TSR1 homolog | | |
| Q5JPI3_ | C3orf38 Uncharacterized protein | K.FEQSDLEAFYNVITVC*GTNEVR.H | 908 |
| C308 | C3orf38 | | |
| P23919_ | DTYMK Thymidylate kinase | R.C*FHQLMK.D | 909 |
| C163 | | | |
| Q96EB1_ | ELP4 Elongator complex protein 4 | K.VEPC*SLTPGYTK.L | 910 |
| C218 | | | |
| Q96FX7_ | TRMT61A tRNA (adenine(58)-N(1))- | R.FCSFSPC*TEQVQR.T | 911 |
| C209 | methyltransferase catalytic | | |
| | subunit TRMT61A | | |
| O14933_ | UBE2L6 Ubiquitin/ISG15-conjugating | K.IYHPNVDENGQICLPIISSENWKPC*T | 912 |
| C98 | enzyme E2 L6 | K.T | |
| Q29RF7_ | PDS5A Sister chromatid cohesion | R.TVQTIEAC*IANFFNQVLVLGR.S | 913 |
| C242 | protein PDS5 homolog A | | |
| Q96T76_ | MMS19 MMS19 nucleotide excision | R.YHPLSSC*LTAR.L | 914 |
| C819 | repair protein homolog | | |
| P23919_ | DTYMK Thymidylate kinase | K.ENFSLDWC*K.Q | 915 |
| C117 | | | |
| Q15149_ | PLEC Plectin | K.YLTC*PK.T | 916 |
| C4574 | | | |
| Q96RP9_ | GFM1 Elongation factor G, | R.VLDGAVLVLCAVGGVQC*QTMTVN | 917 |
| C153 | mitochondrial | R.Q | |
| P04818_ | TYMS Thymidylate synthase | R.DLPLMALPPCHALC*QFYVVNSELSC | 918 |
| C199 | | QLYQR.S | |
| P27708_ | CAD CAD protein | K.AQILVLTYPLIGNYGIPPDEMDEFGL | 919 |
| C73 | | C*K.W | |
| P55265_ | ADAR Double-stranded RNA-specific | K.NFYLC*PV | 920 |
| C1224 | adenosine deaminase | | |
| Q9Y3D2_ | MSRB2 Methionine-R-sulfoxide | K.YC*SGTGWPSFSEAHGTSGSDESHTG | 921 |
| C105 | reductase B2, mitochondrial | ILR.R | |
| O00244_ | ATOX1 Copper transport protein ATOX1 | K.HEFSVDMTC*GGCAEAVSR.V | 922 |
| C12 | | | |
| Q8WV74_ | NUDT8 Nucleoside diphosphate-linked | R.LAGLTC*SGAEGLARPK.Q | 923 |
| C207 | moiety X motif 8, mitochondrial | | |
| Q9NRW3_ | APOBEC3C Probable DNA dC-dU-editing | R.LYYFQYPC*YQEGLR.S | 924 |
| C130 | enzyme APOBEC-3C | | |
| P24468_ | NR2F2 COUP transcription factor 2 | K.AIVLFTSDAC*GLSDVAHVESLQEK.S | 925 |
| C326 | | | |
| P42166_ | TMPO Lamina-associated polypeptide | K.GGTLFGGEVC*K.V | 926 |
| C684 | 2, isoform alpha | | |
| Q96EY5_ | FAM125A Multivesicular body subunit | K.SC*SPLAFSAFGDLTIK.S | 927 |
| C231 | 12A | | |
| P14635_ | CCNB1 G2/mitotic-specific cyclin-B1 | R.FMQNNC*VPK.K | 928 |
| C238 | | | |
| Q8NDH3_ | NPEPL1 Probable aminopeptidase | R.VTEELWQAALSTLNPNPTDSCPLYLN | 929 |
| C81 | NPEPL1 | YATVAALPC*R.V | |
| Q9P0J1_ | PDP1 | R.GMLLGVFDGHAGC*ACSQAVSER.L | 930 |
| C149 | | | |
| Q96P48_ | ARAP1 Arf-GAP with Rho-GAP domain, | R.AVFPEGPC*EEPLQLR.K | 931 |
| C900 | ANK repeat and PH domain-containing | | |
| | protein 1 | | |
| Q96HE7_ | ERO1L ERO1-like protein alpha | R.CFC*QVSGYLDDCTCDVETIDR.F | 932 |
| C37 | | | |
| Q07065_ | CKAP4 Cytoskeleton-associated | K.SSSSSSASAAAAAAAASSSASC*SR.R | 933 |
| C100 | protein 4 | | |
| Q9BRJ7_ | NUDT16L1 Protein syndesmos | R.VLGLGLGC*LR.L | 934 |
| C88 | | | |
| O75439_ | PMPCB Mitochondrial-processing | K.FHFGDSLC*THK.G | 935 |
| C265 | peptidase subunit beta | | |
| O43175_ | PHGDH D-3-phosphoglycerate | K.NAGNC*LSPAVIVGLLK.E | 936 |
| C369 | dehydrogenase | | |
| Q9UNI6_ | DUSP12 Dual specificity protein | R.QAQC*TSYFIEPVQWMESALLGVMD | 937 |
| C265 | phosphatase 12 | GQLLCPK.C | |
| Q06203_ | PPAT Amidophosphoribosyltransferase | K.C*ELENCQPFVVETLHGKI | 938 |
| C100 | | | |
| A0AVT1_ | UBA6 Ubiquitin-like modifier- | R.KPNVGC*QQDSEELLK.L | 939 |
| C347 | activating enzyme 6 | | |
| Q86X76_ | NIT1 Nitrilase homolog 1 | KIGLAVC*YDMR.F | 940 |
| C203 | | | |
| Q6XZE7_ | DNMBP Dynamin-binding protein | R.SLDQTSPC*PLVLVR.I | 941 |
| C691 | | | |
| Q15398_ | DLGAP5 Disks large-associated | R.YRPDMPC*FLLSNQNAVK.A | 942 |
| C129 | protein 5 | | |
| O75717_ | WDHD1 WD repeat and HMG-box | CK.MLALSC*K.L | 943 |
| 773 | DNA-binding protein 1 | | |
| Q01433_ | AMPD2 AMP deaminase 2 | R.SLPGPAPC*LK.H | 944 |
| C107 | | | |
| Q8WVV9_ | HNRPLL Heterogeneous nuclear | K.NIIQPPSCVLHYYNVPLC*VTEETFTK | 945 |
| C464 | ribonucleoprotein L-like | .L | |
| O14733_ | MAP2K7 Dual specificity mitogen- | R.YQAEINDLENLGEMGSGTC*GQVWK | 946 |
| C131 | activated protein kinase | .M | |
| Q14137_ | BOP1 Ribosome biogenesis protein | R.DLQPFPTC*QALVYR.G | 947 |
| C404 | BOP1 | | |
| Q96RU2_ | USP28 Ubiquitin carboxyl-terminal | K.NVGNTC*WFSAVIQSLFQLPEFR.R | 948 |
| C171 | hydrolase 28 | | |
| Q9Y679_ | AUP1 Ancient ubiquitous protein 1 | K.TGC*VDLTITNLLEGAVAFMPEDITK | 949 |
| C391 | | G | |
| P51610_ | HCFC1 Host cell factor 1 | R.VAGINAC*GR.G | 950 |
| C1872 | | | |
| P22307_ | SCP2 Non-specific lipid-transfer | K.SGLTPNDIDVIELHDC*FSTNELLTYE | 951 |
| C307 | protein | ALGLCPEGQGATLVDR.G | |
| Q9BTE3_ | MCMBP Mini-chromosome maintenance | K.LQHINPLLPAC*LNK.E | 952 |
| C325 | complex-binding protein | | |
| Q9HA64_ | FN3KRP Ketosamine-3-kinase | R.ATGHSGGGC*ISQGR.S | 953 |
| C24 | | | |
| Q5TFE4_ | NT5DC1 5-nucleotidase domain- | K.HFLSDTGMAC*R.S | 954 |
| C119 | containing protein 1 | | |
| Q96N67_ | DOCK7 Dedicator of cytokinesis | K.AVLPVTC*HR.D | 955 |
| C2125 | protein 7 | | |
| P52948_ | NUP98 Nuclear pore complex protein | R.WLSC*TATPQLEEEVSLTQK.N | 956 |
| C1312 | Nup98-Nup96 | | |
| Q5U1P0_ | RIF1 Telomere-associated protein | K.ESIPCPTESVYPPLVNC*VAPVDIELPQ | 957 |
| C2298 | RIF1 | ITSNMWAR.G | |
| P51812_ | RPS6KA3 Ribosomal protein S6 kinase | K.EDIGVGSYSVC*K.R | 958 |
| C436 | alpha-3 | | |
| Q92616_ | GCN1L1 Translational activator GCN1 | K.GMGESC*FEDLLPWLMETLTYEQSS | 959 |
| C1692 | | VDR.S | |
| Q15345_ | LRRC41 Leucine-rich repeat-containing | R.C*AAALMASR.R | 960 |
| C297 | protein 41 | | |
| Q9NPH0_ | ACP6 Lysophosphatidic acid | R.MGIDSSDKVDFFILLDNVAAEQAHN | 961 |
| C267 | phosphatase type 6 | LPSC*PMIX.R | |
| P04183_ | TK1 Thymidine kinase, cytosolic | R.YSSSFC*THDR.N | 962 |
| C66 | | | |
| P42166_ | TMPO Lamina-associated polypeptide 2, | K.TYDAASYIC*EAAFDEVK.M | 963 |
| C629 | isoform alpha | | |
| Q15013_ | MAD2L1BP MAD2L1-binding protein | K.C*QQALAELESVLSHLEDFFAR.T | 964 |
| C124 | | | |
| Q9Y5Y2_ | NUBP2 Cytosolic Fe-S cluster assembly | R.AVHQC*DR.G | 965 |
| C72 | factor NUBP2 | | |
| O15446_ | CD3EAP DNA-directed RNA polymerase | R.VLSSC*PQAGEATLLAPSTEAGGGLT | 966 |
| C86 | 1 subunit RPA34 | CASAPQGTLR.I | |
| Q13630_ | TSTA3 GDP-L-fucose synthase | R.KVVSCLSTC*IFPDK.T | 967 |
| C116 | | | |
| Q8IYQ7_ | THNSL1 Threonine synthase-like 1 | R.LGEMIETAYGENFAC*SK.I | 968 |
| C324 | | | |
| P05091_ | ALDH2 Aldehyde dehydrogenase, | K.SPNIIMSDADMDWAVEQAILFALFFN | 969 |
| C319 | mitochondrial | QGQCC*CAGSR.T | |
| Q29RF7_ | PDS5A Sister chromatid cohesion | R.ELLDLHKQPTSEANC*SAMFGK.L | 970 |
| C532 | protein PDS5 homolog A | | |
| Q9Y570_ | PPME1 Protein phosphatase | R.FAEPIGGFQC*VFPGC.- | 971 |
| C381 | methylesterase 1 | | |
| Q14980_ | NUMA1 Nuclear mitotic apparatus | R.QFC*STQAALQAMER.E | 972 |
| C961 | protein 1 | | |
| P53384_ | NUBP1 Cytosolic Fe-S cluster | K.LPHGVVENMSGFIC*PK.C | 973 |
| C235 | assembly factor NUBP1 | | |
| Q15003_ | NCAPH Condensin complex subunit 2 | R.TMC*PLLSMKPGEYSYFSPR.T | 974 |
| C418 | | | |
| P53634_ | CTSC Dipeptidyl peptidase 1 | R.NQASCGSC*YSFASMGMLEARI | 975 |
| C258 | | | |
| Q8NFF5_ | FLAD1 FAD synthase | R.TDPYSCSLC*PFSPTDPGWPAFMR.I | 976 |
| C499 | | | |
| Q9ULA0_ | DNPEP Aspartyl aminopeptidase | K.C*PTSGR.L | 977 |
| C144 | | | |
| P22307_ | SCP2 Non-specific lipid-transfer | R.AIYHSLGMTGIPIENVININNC*ATGSTA | 978 |
| C94 | protein | LFMAR.Q | |
| O15294_ | OGT UDP-N-acetylglucosamine--peptide | K.VMAEANHFIDLSQIPC*NGK.A | 979 |
| C620 | N-acetylglucosaminyl transferase | | |
| Q9Y5S2_ | CDC42BPB Serine/threonine-protein | R.IRPLNSEGTLNLLNC*EPPR.L | 980 |
| C1517 | kinase MRCK beta | | |
| Q8TD19_ | NEK9 Serine/threonine-protein kinase | R.LLTFGC*NK.C | 981 |
| C623 | Nek9 | | |
| Q8N2W9_ | PIAS4 E3 SUMO-protein ligase PIAS4 | R.VSLIC*PLVK.M | 982 |
| C326 | | | |
| Q13158_ | FADD Protein FADD | R.VDDFEAGAAAGAAPGEEDLC*AAFN | 983 |
| C98 | | VICDNVGK.D | |
| Q9UKX7_ | NUP50 Nuclear pore complex protein | K.AC*VGNAYHK.Q | 984 |
| C151 | Nup50 | | |
| Q6PCB5_ | RSBN1L Round spermatid basic protein | K.SIQTIC*SGLLTDVEDQAAK.G | 985 |
| C280 | 1-like protein | | |
| P10398_ | ARAF Serine/threonine-protein kinase | R.TQADELPAC*LLSAAR.L | 986 |
| C597 | A-Raf | | |
| Q9UL40_ | ZNF346 Zinc finger protein 346 | K.NQC*LFTNTQCK.V | 987 |
| C68 | | | |
| P46013_ | MIC167 Antigen KI-67 | K.SEETNTEIVEC*ILK.R | 988 |
| C903 | | | |
| Q16667_ | CDICN3 Cyclin-dependent kinase | R.VNC*SQFLGLCALPGCK.F | 989 |
| C39 | inhibitor 3 | | |
| O75150_ | RNF40 E3 ubiquitin-protein ligase | R.EIQPC*LAESR.A | 990 |
| C890 | BRE1B | | |
| Q00610_ | CLTC Clathrin heavy chain 1 | RIHEGC*EEPATHNALAK.I | 991 |
| C870 | | | |
| Q9Y5T5_ | USP16 Ubiquitin carboxyl-terminal | K.GLSNLGNTC*FFNAVMQNLSQTPVL | 992 |
| C205 | hydrolase 16 | R.E | |
| O95881_ | TXNDC12 Thioredoxin domain-containing | K.SWC*GACK.A | 993 |
| C66 | protein 12 | | |
| Q7Z5K2_ | WAPAL Wings apart-like protein | R.IVEDDASISSC*NK.L | 994 |
| C160 | homolog | | |
| P42166_ | TMPO Lamina-associated polypeptide 2, | R.QLPSLAC*K.Y | 995 |
| C518 | isoform alpha | | |
| Q9Y2S7_ | POLD1P2 Polymerase delta-interacting | R.DC*PHISQR.S | 996 |
| C143 | protein 2 | | |
| E2QRD5_ | C15orf38-AP3S2 Protein C15orf38- | K.C*NFTGDGICT | 997 |
| C183 | AP3S2 | | |
| O95833_ | CLIC3 Chloride intracellular channel | K.ASEDGESVGHC*PSCQR.L | 998 |
| C22 | protein 3 | | |
| O94953_ | KDM4B Lysine-specific demethylase 4B | R.TEPYCAICTLFYPYC*QALQTEK.E | 999 |
| C694 | | | |
| O00541_ | PES1 Pescadillo homolog | K.AGEGTYALDSESC*MEK.L | 1000 |
| C272 | | | |
| Q9NXJ5_ | PGPEP1 Pymglutamyl-peptidase 1 | R.YLC*DFTYYTSLYQSHGR.S | 1001 |
| C149 | | | |
| Q8N5L8_ | RPP25L Ribonuclease P protein subunit | R.DPLDPNEC*GYQPPGAPPGLGSMPSS | 1002 |
| C131 | p25-like protein | SCGPR.S | |
| Q8IZ73_ | RPUSD2 RNA pseudouridylate synthase | R.LLAENEDVVVVDKPSSIPVHPC*GR.F | 1003 |
| C246 | domain-containing protein | | |
| Q99798_ | ACO2 Aconitate hydratase, | R.VGLIGSC*TNSSYEDMGR.S | 1004 |
| C385 | mitochondrial | | |
| Q9GZR2_ | REXO4 RNA exonuclease 4 | K.ILGLQVQQAEHC*SIQDAQAAMR.L | 1005 |
| C382 | | | |
| Q13613_ | MTMR1 Myotubularin-related protein 1 | K.DVMYIC*PFMGAVSGTLTVTDFK.L | 1006 |
| C117 | | | |
| Q9NUI1_ | DECR2 Peroxisomal 2,4-dienoyl-CoA | R.HLFC*PDLLR.D | 1007 |
| C22 | reductase | | |
| Q02556_ | IRF8 Interferon regulatory factor 8 | R.VFCSGNAVVC*K.G | 1008 |
| C306 | | | |
| Q9UPT9_ | USP22 Ubiquitin carboxyl-terminal | K.ITSNC*TIGLR.G | 1009 |
| C171 | hydrolase 22 | | |
| Q8N999_ | Cl2orf29 Uncharacterized protein | K.C*LFNHFLK.I | 1010 |
| C302 | C12orf29 | | |
| Q8IU81_ | IRF2BP1 Interferon regulatory factor | R.SFREPAPAEALPQQYPEPAPAALC*G | 1011 |
| C363 | 2-binding protein 1 | PPPR.A | |
| Q9C0I1_ | MTMR12 Myotubularin-related | R.VFQFC*LR.Y | 1012 |
| C152 | protein 12 | | |
| Q9P2X3_ | IMPACT Protein IMPACT | R.STFQAHLAPVVC*PK.Q | 1013 |
| C195 | | | |
| Q6QNY0_ | BLOC1S3 Biogenesis of lysosome | R.GDLC*ALAER.L | 1014 |
| C168 | related organelles complex | | |
| Q15796_ | SMAD2 Mothers against decapentaplegic | K.CVTIPSTC*SEIWGLSTPNTIDQWDTT | 1015 |
| C81 | homolog 2 | GLYSFSEQTR.S | |
| Q9NZB2_ | FAM120A Constitutive coactivator of | K.GSQMGTVQPIPC*LLSMPTR.N | 1016 |
| C531 | PPAR-gamma-like protein | | |
| Q9HB90_ | RRAGC Ras-related GTP-binding | R.SC*GHQTSASSLK.A | 1017 |
| C377 | protein C | | |
| Q9BR61_ | ACBD6 Acyl-CoA-binding domain- | R.DQDGCLPEEVTGC*K.T | 1018 |
| C267 | containing protein 6 | | |
| P16455_ | MGMT Methylated-DNA--protein-cysteine | R.GNPVPILIPC*HR.V | 1019 |
| C145 | methyltransferase | | |
| Q86UV5_ | USP48 Ubiquitin carboxyl-terminal | R.IWLEPC*IR.G | 1020 |
| C39 | hydrolase 48 | | |
| A2A288_ | ZC3H12D Probable ribonuclease | R.LAFSDDLGPLGPPLPVPAC*SLTPR.L | 1021 |
| C367 | ZC3H12D | | |
| Q8NEC7_ | GSTCD Glutathione S-transferase C- | K.AC*AEVSQWTR.L | 1022 |
| C140 | terminal domain-containing | | |
| Q6PJG6_ | BRAT1 BRCA1-associated ATM activator | R.THC*PYAVALPEVAPAQPLTEALR.A | 1023 |
| C673 | 1 | | |
| Q13232_ | NME3 Nucleoside diphosphate kinase 3 | R.ADELLC*WEDSAGHWLYE | 1024 |
| C158 | | | |
| Q86X76_ | NIT1 Nitrilase homolog 1 | K.THLC*DVEIPGQGPMCESNSTMPGPS | 1025 |
| C165 | | LESPVSTPAGK.I | |
| P42695_ | NCAPD3 Condensin-2 complex subunit | R.C*VMAMLR.R | 1026 |
| C541 | D3 | | |
| P41226_ | UBA7 Ubiquitin-like modifier- | R.APASAAASEDAPYPVC*TVR.Y | 1027 |
| C599 | activating enzyme 7 | | |
| Q99986_ | VRK1 Serine/threonine-protein kinase | K.VGLPIGQGGFGC*IYLADMNSSESVG | 1028 |
| C50 | VRK1 | SDAPCVVK.V | |
| Q8WUM4_ | PDCD61P Programmed cell death 6- | K.FPFSENQIC*LTFTWK.D | 1029 |
| C90 | interacting protein | | |
| P29590_ | PML Protein PML | R.GCSKPLCC*SCALLDSSHSELK.0 | 1030 |
| C213 | | | |
| Q9P0K7_ | RAI14 Ankycorbin | K.QILTMC*K.N | 1031 |
| C973 | | | |
| P53992_ | SEC24C Protein sport protein Sec24C | R.APPSSGAPPASTAQAPC*GQAAYGQF | 1032 |
| C78 | | GQGDVQNGPSSTVQMQR.L | |
| Q13867_ | BLMH Bleomycin hydrolase | R.C*WIFSCLNVMR.L | 1033 |
| C73 | | | |
| Q8ND24_ | RNF214 RING finger protein 214 | R.SSHAPATC*K.L | 1034 |
| C655 | | | |
| Q96EK4_ | THAP11 THAP domain-containing | R.AGVSGC*FSTFQPTTGHR.L | 1035 |
| C48 | protein 11 | | |
| Q961V0_ | NGLY1 Peptide-N(4)-(N-acetyl- | R.C*GEWANCFTLCCR.A | 1036 |
| C309 | beta-glucosaminypasparagin | | |
| Q5T1V6_ | DDX59 Probable ATP-dependent RNA | DDX59 K.NLPC*ANVR.Q | 1037 |
| C414 | helicase DDX59 | | |
| Q9UHQ1_ | NARF Nuclear prelamin A recognition | K.VLVVSVC*PQSLPYFAAK.F | 1038 |
| C99 | factor | | |
| O43396_ | TXNL1 Thioredoxin-like protein 1 | R.GC*GPCLR.I | 1039 |
| C34 | | | |
| Q81V53_ | DENND1C DENN domain-containing | R.GNSKPLSC*FVAPDSGRLPS1PENR.N | 1040 |
| C174 | protein IC | | |
| Q8N9T8_ | ICRI1 Protein ICRI1 homolog | R.LLGPTVMLGGC*EFSR.Q | 1041 |
| C673 | | | |

[0549] Table 3 illustrates a list of unliganded cysteines. Table 3 further shows the accession number (or the protein identifier) of the protein, cysteine residue number, and the respective SEQ ID NO.

TABLE 3

| | | SEQ |
|---|---|---|
| | | ID |
| Identifier | Protein Name | NO: |
| P26641_C266 | EEF1G Elongation factor 1- | 1042 |
| | gamma | |
| P07900_C374 | HSP90AA1 Heat shock protein | 1043 |
| | HSP 90-alpha | |
| P23528_C139 | CFL1 Cofilin-1 | 1044 |
| P68104_C411 | EEF1A1 Elongation factor 1- | 1045 |
| | alpha 1 | |
| P08238_C366 | HSP90AB1 Heat shock protein | 1046 |
| | HSP 90-beta | |
| P60981_C163 | DSTN Destrin | 1047 |
| P61978_C132 | HNRNPK Heterogeneous | 1048 |
| | nuclear ribonucleoprotein K | |
| P60709_C217 | ACTB Actin, cytoplasmic 1 | 1049 |
| Q15365_C54 | PCBP1 Poly(rC)-binding | 1050 |
| | protein 1 | |
| P60709_C272 | ACTB Actin, cytoplasmic 1 | 1051 |
| P27348_C134 | YWHAQ 14-3-3 protein theta | 1052 |
| P55769_C30 | NHP2L1 NHP2-like protein 1 | 1053 |
| Q6IS14_C129 | EIF5AL1 Eukaryotic | 1054 |
| | translation initiation factor 5A- | |
| | 1-like | |
| P11413_C13 | G6PD Glucose-6-phosphate 1- | 1055 |
| | dehydrogenase | |
| P04406_C247 | GAPDH Glyceraldehyde-3- | 1056 |
| | phosphate dehydrogenase | |
| P37802_C124 | TAGLN2 Transgelin-2 | 1057 |
| Q13185_C177 | CBX3 Chromobox protein | 1058 |
| | homolog 3 | |
| Q9Y3F4_C340 | STRAP Serine-threonine | 1059 |
| | kinase receptor-associated | |
| | protein | |
| Q9NTK5_C55 | OLA1 Obg-like ATPase 1 | 1060 |
| P53396_C20 | ACLY ATP-citrate synthase | 1061 |
| P62826_C112 | RAN GTP-binding nuclear | 1062 |
| | protein Ran | |
| P15880_C229 | RPS2 40S ribosomal protein | 1063 |
| | S2 | |
| P08238_C589 | HSP90AB1 Heat shock protein | 1064 |
| | HSP 90-beta | |
| P30084_C62 | ECHS1 Enoyl-CoA hydratase, | 1065 |
| | mitochondrial | |
| P47756_C36 | CAPZB F-actin-capping | 1066 |
| | protein subunit beta | |
| P52292_C223 | KPNA2 Importin subunit | 1067 |
| | alpha-2 | |
| Q15366_C109 | PCBP2 Poly(rC)-binding | 1068 |
| | protein 2 | |
| P14174_C81 | MIF Macrophage migration | 1069 |
| | inhibitory factor | |
| P61981_C97 | YWHAG 14-3-3 protein | 1070 |
| | gamma | |
| P00338_C163 | LDHA L-lactate | 1071 |
| | dehydrogenase A chain | |
| Q15019_C111 | SEPT2 Septin-2 | 1072 |
| P84243_C111 | H3F3B Histone H3.3 | 1073 |
| P18085_C62 | ARF4 ADP-ribosylation factor | 1074 |
| | 4 | |
| P10599_C73 | TXN Thioredoxin | 1075 |
| P13639_C466 | EEF2 Elongation factor 2 | 1076 |
| P00338_C293 | LDHA L-lactate | 1077 |
| | dehydrogenase A chain | |
| P49721_C91 | PSMB2 Proteasome subunit | 1078 |
| | beta type-2 | |
| P28062_C160 | PSMB8 Proteasome subunit | 1079 |
| | beta type-8 | |
| P10809_C237 | HSPD1 60 kDa heat shock | 1080 |
| | protein, mitochondrial | |
| P60981_C23 | DSTN Destrin | 1081 |
| P31943_C267 | HNRNPH1 Heterogeneous | 1082 |
| | nuclear ribonucleoprotein H | |
| P49321_C708 | NASP Nuclear autoantigenic | 1083 |
| | sperm protein | |
| Q99829_C53 | CPNE1 Copine-1 | 1084 |
| P68104_C111 | EEF1A1 Elongation factor 1- | 1085 |
| | alpha 1 | |
| Q02750_C207 | MAP2K1 Dual specificity | 1086 |
| | mitogen-activated protein | |
| | kinase | |
| O14950_C109 | MYL12B Myosin regulatory | 1087 |
| | light chain 12B | |
| P47756_C206 | CAPZB F-actin-capping | 1088 |
| | protein subunit beta | |
| P49327_C1448 | FASN Fatty acid synthase | 1089 |
| P14868_C349 | DARS Aspartate--tRNA | 1090 |
| | ligase, cytoplasmic | |
| P07437_C201 | TUBB Tubulin beta chain | 1091 |
| P07437_C303 | TUBB Tubulin beta chain | 1092 |
| P61077_C111 | UBE2D3 Ubiquitin- | 1093 |
| | conjugating enzyme E2 D3 | |
| P15153_C178 | RAC2 Ras-related C3 | 1094 |
| | botulinum toxin substrate 2 | |
| Q04637_C662 | EIF4G1 Eukaryotic translation | 1095 |
| | initiation factor 4 gamma 1 | |
| P78347_C215 | GTF2I General transcription | 1096 |
| | factor II-I | |
| Q15370_C89 | TCEB2 Transcription | 1097 |
| | elongation factor B | |
| | polypeptide 2 | |
| P62753_C12 | RPS6 40S ribosomal protein | 1098 |
| | S6 | |
| P31948_C461 | STIP1 Stress-induced- | 1099 |
| | phosphoprotein 1 | |
| Q9UL46_C91 | PSME2 Proteasome activator | 1100 |
| | complex subunit 2 | |
| P63220_C56 | RPS21 40S ribosomal protein | 1101 |
| | S21 | |
| P55809_C67 | OXCT1 Succinyl-CoA: 3- | 1102 |
| | ketoacid coenzyme A | |
| | transferase 1, | |
| P30153_C377 | PPP2R1A Serine/threonine- | 1103 |
| | protein phosphatase 2A 65 kDa | |
| | regulatory subunit A alpha | |
| | isoform | |
| P30153_C390 | PPP2R1A Serine/threonine- | 1104 |
| | protein phosphatase 2A 65 kDa | |
| | regulatory subunit A alpha | |
| | isoform | |
| P60866_C70 | RPS20 40S ribosomal protein | 1105 |
| | S20 | |
| Q9P258_C428 | RCC2 Protein RCC2 | 1106 |
| P60709_C285 | ACTB Actin, cytoplasmic 1 | 1107 |
| P22234_C81 | PAICS Multifunctional protein | 1108 |
| | ADE2 | |
| P27348_C237 | YWHAQ 14-3-3 protein theta | 1109 |
| P12004_C81 | PCNA Proliferating cell | 1110 |
| | nuclear antigen | |
| P68104_C234 | EEF1A1 Elongation factor 1- | 1111 |
| | alpha 1 | |
| Q96FW1_C23 | OTUB1 Ubiquitin thioesterase | 1112 |
| | OTUB1 | |
| Q13200_C779 | PSMD2 26S proteasome non- | 1113 |
| | ATPase regulatory subunit 2 | |
| P22314_C632 | UBA1 Ubiquitin-like modifier- | 1114 |
| | activating enzyme 1 | |
| P37802_C38 | TAGLN2 Transgelin-2 | 1115 |
| P37802_C63 | TAGLN2 Transgelin-2 | 1116 |
| P46782_C172 | RPS5 40S ribosomal protein | 1117 |
| | S5 | |
| P04075_C339 | ALDOA Fructose- | 1118 |
| | bisphosphate aldolase A | |
| P05386_C61 | RPLP1 60S acidic ribosomal | 1119 |
| | protein P1 | |
| P63000_C178 | RAC1 Ras-related C3 | 1120 |
| | botulinum toxin substrate 1 | |
| P07195_C294 | LDHB L-lactate | 1121 |
| | dehydrogenase B chain | |
| Q13148_C244 | TARDBP TAR DNA-binding | 1122 |
| | protein 43 | |
| P30048_C229 | PRDX3 Thioredoxin- | 1123 |
| | dependent peroxide reductase, | |
| | mitochondrial | |
| P62306_C66 | SNRPF Small nuclear | 1124 |
| | ribonucleoprotein F | |
| O15371_C19 | EIF3D Eukaryotic translation | 1125 |
| | initiation factor 3 subunit | |
| P17987_C397 | TCP1 T-complex protein 1 | 1126 |
| | subunit alpha | |
| Q9Y5P6_C245 | GMPPB Mannose-1-phosphate | 1127 |
| | guanyltransferase beta | |
| Q9BW61_C25 | DDA1 DET1- and DDB1- | 1128 |
| | associated protein 1 | |
| Q14974_C585 | KPNB1 Importin subunit beta- | 1129 |
| | 1 | |
| Q9BUF5_C303 | TUBB6 Tubulin beta-6 chain | 1130 |
| P52272_C653 | HNRNPM Heterogeneous | 1131 |
| | nuclear ribonucleoprotein M | |
| O75940_C214 | SMNDC1 Survival of motor | 1132 |
| | neuron-related-splicing factor | |
| | 3 | |
| O00233_C59 | PSMD9 26S proteasome non- | 1133 |
| | ATPase regulatory subunit 9 | |
| P63208_C160 | SKP1 S-phase kinase- | 1134 |
| | associated protein 1 | |
| Q9Y224_C19 | C14orf166 UPF0568 protein | 1135 |
| | C14orf166 | |
| P30626_C194 | SRI Sorcin | 1136 |
| Q9BXW7_C392 | CECR5 Cat eye syndrome | 1137 |
| | critical region protein 5 | |
| P60842_C134 | EIF4A1 Eukaryotic initiation | 1138 |
| | factor 4A-I | |
| P63220_C17 | RPS21 40S ribosomal protein | 1139 |
| | S21 | |
| P50990_C149 | CCT8 T-complex protein 1 | 1140 |
| | subunit theta | |
| P22234_C63 | PAICS Multifunctional protein | 1141 |
| | ADE2 | |
| Q13148_C39 | TARDBP TAR DNA-binding | 1142 |
| | protein 43 | |
| P17987_C357 | TCP1 T-complex protein 1 | 1143 |
| | subunit alpha | |
| P31946_C96 | YWHAB 14-3-3 protein | 1144 |
| | beta/alpha | |
| P61289_C92 | PSME3 Proteasome activator | 1145 |
| | complex subunit 3 | |
| P26641_C68 | EEF1G Elongation factor 1- | 1146 |
| | gamma | |
| P78371_C395 | CCT2 T-complex protein 1 | 1147 |
| | subunit beta | |
| P14868_C203 | DARS Aspartate--tRNA | 1148 |
| | ligase, cytoplasmic | |
| Q92530_C185 | PSMF1 Proteasome inhibitor | 1149 |
| | PI31 subunit | |
| P25398_C92 | RPS12 40S ribosomal protein | 1150 |
| | S12 | |
| P25205_C148 | MCM3 DNA replication | 1151 |
| | licensing factor MCM3 | |
| P60174_C79 | TPI1 Triosephosphate | 1152 |
| | isomerase | |
| P43487_C132 | RANBP1 Ran-specific | 1153 |
| | GTPase-activating protein | |
| P62280_C131 | RPS11 40S ribosomal protein | 1154 |
| | S11 | |
| P13639_C651 | EEF2 Elongation factor 2 | 1155 |
| P13639_C751 | EEF2 Elongation factor 2 | 1156 |
| Q9NUQ9_C10 | FAM49B Protein FAM49B | 1157 |
| P62937_C62 | PPIA Peptidyl-prolyl cis-trans | 1158 |
| | isomerase A | |
| P23528_C39 | CFL1 Cofilin-1 | 1159 |
| P46776_C70 | RPL27A 60S ribosomal | 1160 |
| | protein L27a | |
| P49915_C456 | GMPS GMP synthase | 1161 |
| Q16851_C123 | UGP2 UTP-glucose-1- | 1162 |
| | phosphate uridylyltransferase | |
| P14618_C358 | PKM Pyruvate kinase | 1163 |
| | isozymes M1/M2 | |
| P14618_C474 | PKM Pyruvate kinase | 1164 |
| | isozymes M1/M2 | |
| P13489_C409 | RNH1 Ribonuclease inhibitor | 1165 |
| O15355_C241 | PPM1G Protein phosphatase | 1166 |
| | 1G | |
| P68431_C111 | HIST1H3J Histone H3.1 | 1167 |
| P08238_C521 | HSP90AB1 Heat shock protein | 1168 |
| | HSP 90-beta | |
| Q99439_C175 | CNN2 Calponin-2 | 1169 |
| O00299_C223 | CLIC1 Chloride intracellular | 1170 |
| | channel protein 1 | |
| Q96KB5_C22 | PBK Lymphokine-activated | 1171 |
| | killer T-cell-originated protein | |
| | kinase | |
| P00492_C106 | HPRT1 Hypoxanthine-guanine | 1172 |
| | phosphoribosyltransferase | |
| Q15631_C225 | TSN Translin | 1173 |
| P52565_C79 | ARHGDIA Rho GDP- | 1174 |
| | dissociation inhibitor 1 | |
| P78417_C237 | GSTO1 Glutathione S- | 1175 |
| | transferase omega-1 | |
| Q01518_C93 | CAP1 Adenylyl cyclase- | 1176 |
| | associated protein 1 | |
| Q13148_C50 | TARDBP TAR DNA-binding | 1177 |
| | protein 43 | |
| P51665_C116 | PSMD7 26S proteasome non- | 1178 |
| | ATPase regulatory subunit 7 | |
| P17987_C147 | TCP1 T-complex protein 1 | 1179 |
| | subunit alpha | |
| O00299_C59 | CLIC1 Chloride intracellular | 1180 |
| | channel protein 1 | |
| P61077_C85 | UBE2D3 Ubiquitin- | 1181 |
| | conjugating enzyme E2 D3 | |
| Q06830_C173 | PRDX1 Peroxiredoxin-1 | 1182 |
| P06733_C389 | ENO1 Alpha-enolase | 1183 |
| P28062_C120 | PSMB8 Proteasome subunit | 1184 |
| | beta type-8 | |
| Q96B23_C57 | C18orf25 Uncharacterized | 1185 |
| | protein C18orf25 | |
| P05388_C119 | RPLP0 60S acidic ribosomal | 1186 |
| | protein P0 | |
| Q14353_C91 | GAMT Guanidinoacetate N- | 1187 |
| | methyltransferase | |
| P11142_C17 | HSPA8 Heat shock cognate 71 | 1188 |
| | kDa protein | |
| Q9UI30_C33 | TRMT112 tRNA | 1189 |
| | methyltransferase 112 | |
| | homolog | |
| P27348_C94 | YWHAQ 14-3-3 protein theta | 1190 |
| P51812_C579 | RPS6KA3 Ribosomal protein | 1191 |
| | S6 kinase alpha-3 | |
| P62304_C46 | SNRPE Small nuclear | 1192 |
| | ribonucleoprotein E | |
| P67936_C247 | TPM4 Tropomyosin alpha-4 | 1193 |
| | chain | |
| Q9H3P7_C129 | ACBD3 Golgi resident protein | 1194 |
| | GCP60 | |
| P49589_C27 | CARS Cysteine--tRNA ligase, | 1195 |
| | cytoplasmic | |
| Q9BY32_C146 | ITPA Inosine triphosphate | 1196 |
| | pyrophosphatase | |
| P25205_C360 | MCM3 DNA replication | 1197 |
| | licensing factor MCM3 | |
| Q96GX9_C147 | APIP Probable | 1198 |
| | methylthioribulose-1- | |
| | phosphate dehydratas | |
| P18669_C153 | PGAM1 Phosphoglycerate | 1199 |
| | mutase 1 | |
| O75390_C211 | CS Citrate synthase, | 1200 |
| | mitochondrial | |
| Q16555_C504 | DPYSL2 | 1201 |
| | Dihydropyrimidinase-related | |
| | protein 2 | |
| P62993_C32 | GRB2 Growth factor receptor- | 1202 |
| | bound protein 2 | |
| P63104_C94 | YWHAZ 14-3-3 protein | 1203 |
| | zeta/delta | |
| B0V043_C112 | VARS Valyl-tRNA synthetase | 1204 |
| P62937_C161 | PPIA Peptidyl-prolyl cis-trans | 1205 |
| | isomerase A | |
| Q8N806_C35 | UBR7 Putative E3 ubiquitin- | 1206 |
| | protein ligase UBR7 | |
| P10768_C56 | ESD S-formylglutathione | 1207 |
| | hydrolase | |
| Q16630_C159 | CPSF6 Cleavage and | 1208 |
| | polyadenylation specificity | |
| | factor subunit | |
| P47756_C147 | CAPZB F-actin-capping | 1209 |
| | protein subunit beta | |
| Q9UMR2_C393 | DDX19B ATP-dependent | 1210 |
| | RNA helicase DDX19B | |
| P00558_C379 | PGK1 Phosphoglycerate | 1211 |
| | kinase 1 | |
| Q9NZZ3_C20 | CHMP5 Charged | 1212 |
| | multivesicular body protein 5 | |
| P51610_C1886 | HCFC1 Host cell factor 1 | 1213 |
| P41250_C471 | GARS Glycine-tRNA ligase | 1214 |
| O00299_C191 | CLIC1 Chloride intracellular | 1215 |
| | channel protein 1 | |
| Q9BV86_C195 | NTMT1 N-terminal Xaa-Pro- | 1216 |
| | Lys N-methyltransferase 1 | |
| Q15369_C112 | TCEB1 Transcription | 1217 |
| | elongation factor B | |
| | polypeptide 1 | |
| P14618_C49 | PKM Pyruvate kinase | 1218 |
| | isozymes M1/M2 | |
| O43707_C499 | ACTN4 Alpha-actinin-4 | 1219 |
| Q16576_C97 | RBBP7 Histone-binding | 1220 |
| | protein RBBP7 | |
| P28838_C462 | LAP3 Cytosol aminopeptidase | 1221 |
| Q00839_C607 | HNRNPU Heterogeneous | 1222 |
| | nuclear ribonucleoprotein U | |
| O95861_C42 | BPNT1 3(2),5-bisphosphate | 1223 |
| | nucleotidase 1 | |
| P40926_C212 | MDH2 Malate dehydrogenase, | 1224 |
| | mitochondrial | |
| Q9Y2Z0_C62 | SUGT1 Suppressor of G2 | 1225 |
| | allele of SKP1 homolog | |
| O60828_C60 | PQBP1 Polyglutamine-binding | 1226 |
| | protein 1 | |
| P09661_C89 | SNRPA1 U2 small nuclear | 1227 |
| | ribonucleoprotein A | |
| P63279_C138 | UBE2I SUMO-conjugating | 1228 |
| | enzyme UBC9 | |
| P62258_C98 | YWHAE 14-3-3 protein | 1229 |
| | epsilon | |
| Q8WVJ2_C99 | NUDCD2 NudC domain- | 1230 |
| | containing protein 2 | |
| Q15365_C158 | PCBP1 Poly(rC)-binding | 1231 |
| | protein 1 | |
| P07900_C597 | HSP90AA1 Heat shock protein | 1232 |
| | HSP 90-alpha | |
| P21333_C1157 | FLNA Filamin-A | 1233 |
| P14618_C326 | PKM Pyruvate kinase | 1234 |
| | isozymes M1/M2 | |
| Q13363_C134 | CTBP1 C-terminal-binding | 1235 |
| | protein 1 | |
| P48643_C181 | CCT5 T-complex protein 1 | 1236 |
| | subunit epsilon | |
| P00338_C35 | LDHA L-lactate | 1237 |
| | dehydrogenase A chain | |
| P25789_C107 | PSMA4 Proteasome subunit | 1238 |
| | alpha type-4 | |
| P28838_C335 | LAP3 Cytosol aminopeptidase | 1239 |
| P00558_C316 | PGK1 Phosphoglycerate | 1240 |
| | kinase 1 | |
| Q9BQ69_C186 | MACROD1 O-acetyl-ADP- | 1241 |
| | ribose deacetylase MACROD1 | |
| P23368_C120 | ME2 NAD-dependent malic | 1242 |
| | enzyme, mitochondrial | |
| P07195_C36 | LDHB L-lactate | 1243 |
| | dehydrogenase B chain | |
| Q92879_C150 | CELF1 CUGBP Elav-like | 1244 |
| | family member 1 | |
| Q9Y696_C100 | CLIC4 Chloride intracellular | 1245 |
| | channel protein 4 | |
| Q8NBF2_C716 | NHLRC2 NHL repeat- | 1246 |
| | containing protein 2 | |
| P24534_C50 | EEF1B2 Elongation factor 1- | 1247 |
| | beta | |
| P46782_C155 | RPS5 40S ribosomal protein | 1248 |
| | S5 | |
| H3BQZ7_C57 | Uncharacterized protein | 1249 |
| Q93052_C364 | LPP Lipoma-preferred partner | 1250 |
| P04075_C202 | ALDOA Fructose- | 1251 |
| | bisphosphate aldolase A | |
| Q7KZF4_C560 | SND1 Staphylococcal nuclease | 1252 |
| | domain-containing protein | |
| P40227_C406 | CCT6A T-complex protein 1 | 1253 |
| | subunit zeta | |
| P60174_C255 | TPI1 Triosephosphate | 1254 |
| | isomerase | |
| Q08J23_C321 | NSUN2 tRNA (cytosine(34)- | 1255 |
| | C(5))-methyltransferase | |
| P15927_C219 | RPA2 Replication protein A 32 | 1256 |
| | kDa subunit | |
| P09622_C477 | DLD Dihydrolipoyl | 1257 |
| | dehydrogenase, mitochondrial | |
| P28838_C376 | LAP3 Cytosol aminopeptidase | 1258 |
| P49915_C523 | GMPS GMP synthase | 1259 |
| Q9H3H3_C222 | C11orf68 UPF0696 protein | 1260 |
| | C11orf68 | |
| P07737_C128 | PFN1 Profilin-1 | 1261 |
| Q00839_C594 | HNRNPU Heterogeneous | 1262 |
| | nuclear ribonucleoprotein U | |
| Q14974_C455 | KPNB1 Importin subunit beta- | 1263 |
| | 1 | |
| O15067_C66 | PFAS | 1264 |
| | Phosphoribosylformylglycinamidine | |
| | synthase | |
| Q01813_C112 | PFKP 6-phosphofructokinase | 1265 |
| | type C | |
| P11413_C385 | G6PD Glucose-6-phosphate 1- | 1266 |
| | dehydrogenase | |
| Q13561_C240 | DCTN2 Dynactin subunit 2 | 1267 |
| Q13162_C245 | PRDX4 Peroxiredoxin-4 | 1268 |
| P50991_C252 | CCT4 T-complex protein 1 | 1269 |
| | subunit delta | |
| P04899_C112 | GNAI2 Guanine nucleotide- | 1270 |
| | binding protein G(i) subunit | |
| | alpha I2 | |
| O43765_C153 | SGTA Small glutamine-rich | 1271 |
| | tetratricopeptide repeat- | |
| | containing protein alpha | |
| P34932_C290 | HSPA4 Heat shock 70 kDa | 1272 |
| | protein 4 | |
| P61247_C96 | RPS3A 40S ribosomal protein | 1273 |
| | S3a | |
| P04075_C73 | ALDOA Fructose- | 1274 |
| | bisphosphate aldolase A | |
| Q96EP5_C85 | DAZAP1 DAZ-associated | 1275 |
| | protein 1 | |
| P27708_C1889 | CAD CAD protein | 1276 |
| Q16822_C431 | PCK2 Phosphoenolpyruvate | 1277 |
| | carboxykinase | |
| Q96KB5_C70 | PBK Lymphokine-activated | 1278 |
| | killer T-cell-originated protein | |
| P00558_C108 | PGK1 Phosphoglycerate | 1279 |
| | kinase 1 | |
| Q15365_C293 | PCBP1 Poly(rC)-binding | 1280 |
| | protein 1 | |
| P60174_C164 | TPI1 Triosephosphate | 1281 |
| | isomerase | |
| P62826_C120 | RAN GTP-binding nuclear | 1282 |
| | protein Ran | |
| O75348_C69 | ATP6V1G1 V-type proton | 1283 |
| | ATPase subunit G 1 | |
| Q9Y2D5_C296 | AKAP2 A-kinase anchor | 1284 |
| | protein 2 | |
| P61158_C12 | ACTR3 Actin-related protein 3 | 1285 |
| P36405_C118 | ARL3 ADP-ribosylation | 1286 |
| | factor-like protein 3 | |
| P62937_C115 | PPIA Peptidyl-prolyl cis-trans | 1287 |
| | isomerase A | |
| P35754_C83 | GLRX Glutaredoxin-1 | 1288 |
| O60664_C341 | PLIN3 Perilipin-3 | 1289 |
| Q12874_C103 | SF3A3 Splicing factor 3A | 1290 |
| | subunit 3 | |
| Q9H4M9_C138 | EHD1 EH domain-containing | 1291 |
| | protein 1 | |
| Q15185_C76 | PTGES3 Prostaglandin E | 1292 |
| | synthase 3 | |
| P04632_C190 | CAPNS1 Calpain small | 1293 |
| | subunit 1 | |
| P13489_C75 | RNH1 Ribonuclease inhibitor | 1294 |
| O95372_C213 | LYPLA2 Acyl-protein | 1295 |
| | thioesterase 2 | |
| P84085_C62 | ARF5 ADP-ribosylation factor | 1296 |
| | 5 | |
| P55786_C265 | NPEPPS Puromycin-sensitive | 1297 |
| | aminopeptidase | |
| Q14204_C1977 | DYNC1H1 Cytoplasmic | 1298 |
| | dynein 1 heavy chain 1 | |
| P14866_C581 | HNRNPL Heterogeneous | 1299 |
| | nuclear ribonucleoprotein L | |
| Q14980_C160 | NUMA1 Nuclear mitotic | 1300 |
| | apparatus protein 1 | |
| O00743_C192 | PPP6C Serine/threonine- | 1301 |
| | protein phosphatase 6 catalytic | |
| | subunit | |
| P07741_C83 | APRT Adenine | 1302 |
| | phosphoribosyltransferase | |
| O75607_C105 | NPM3 Nucleoplasmin-3 | 1303 |
| P09429_C23 | HMGB1 High mobility group | 1304 |
| | protein B1 | |
| P26641_C339 | EEF1G Elongation factor 1- | 1305 |
| | gamma | |
| O60232_C152 | SSSCA1 Sjoegren | 1306 |
| | syndrome/scleroderma | |
| | autoantigen 1 | |
| Q66K74_C342 | MAP1S Microtubule- | 1307 |
| | associated protein 1S | |
| Q52LJ0_C63 | FAM98B Protein FAM98B | 1308 |
| P62249_C25 | RPS16 40S ribosomal protein | 1309 |
| | S16 | |
| P35579_C988 | MYH9 Myosin-9 | 1310 |
| P33316_C222 | DUT Deoxyuridine 5- | 1311 |
| | triphosphate | |
| | nucleotidohydrolase, | |
| Q9Y6E0_C89 | STK24 Serine/threonine- | 1312 |
| | protein kinase 24 | |
| P49411_C222 | TUFM Elongation factor Tu, | 1313 |
| | mitochondrial | |
| Q01813_C360 | PFKP 6-phosphofructokinase | 1314 |
| | type C | |
| Q7L2J0_C177 | MEPCE 7SK snRNA | 1315 |
| | methylphosphate capping | |
| | enzyme | |
| O15355_C164 | PPM1G Protein phosphatase | 1316 |
| | 1G | |
| Q6IBS0_C141 | TWF2 Twinfilin-2 | 1317 |
| Q9NVG8_C387 | TBC1D13 TBC1 domain | 1318 |
| | family member 13 | |
| O15382_C342 | BCAT2 Branched-chain- | 1319 |
| | amino-acid aminotransferase, | |
| | mitochandrial | |
| P12004_C135 | PCNA Proliferating cell | 1320 |
| | nuclear antigen | |
| P60660_C32 | MYL6 Myosin light | 1321 |
| | polypeptide 6 | |
| P55072_C522 | VCP Transitional endoplasmic | 1322 |
| | reticulum ATPase | |
| Q99439_C240 | CNN2 Calponin-2 | 1323 |
| P05455_C245 | SSB Lupus La protein | 1324 |
| O75131_C54 | CPNE3 Copine-3 | 1325 |
| P26358_C62 | DNMT1 DNA (cytosine-5)- | 1326 |
| | methyltransferase 1 | |
| Q7Z4W1_C138 | DCXR L-xylulose reductase | 1327 |
| P10809_C447 | HSPD1 60 kDa heat shock | 1328 |
| | protein, mitochondrial | |
| P84077_C159 | ARF1 ADP-ribosylation factor | 1329 |
| | 1 | |
| Q15185_C40 | PTGES3 Prostaglandin E | 1330 |
| | synthase 3 | |
| Q16854_C87 | DGUOK Deoxyguanosine | 1331 |
| | kinase, mitochondrial | |
| Q9Y508_C8 | RNF114 RING finger protein | 1332 |
| | 114 | |
| P63208_C120 | SKP1 S-phase kinase- | 1333 |
| | associated protein 1 | |
| O00148_C164 | DDX39A ATP-dependent | 1334 |
| | RNA helicase DDX39A | |
| P25786_C148 | PSMA1 Proteasome subunit | 1335 |
| | alpha type-1 | |
| P61221_C88 | ABCE1 ATP-binding cassette | 1336 |
| | sub-family E member 1 | |
| O60664_C60 | PLIN3 Perilipin-3 | 1337 |
| P15311_C117 | EZR Ezrin | 1338 |
| Q9UBW8_C110 | COPS7A COP9 signalosome | 1339 |
| | complex subunit 7a | |
| P42765_C287 | ACAA2 3-ketoacyl-CoA | 1340 |
| | thiolase, mitochondrial | |
| Q99832_C158 | CCT7 T-complex protein 1 | 1341 |
| | subunit eta | |
| P61978_C145 | HNRNPK Heterogeneous | 1342 |
| | nuclear ribonucleoprotein K | |
| Q13310_C132 | PABPC4 Polyadenylate- | 1343 |
| | binding protein 4 | |
| P35998_C377 | PSMC2 26S protease | 1344 |
| | regulatory subunit 7 | |
| P52789_C794 | HK2 Hexokinase-2 | 1345 |
| P35579_C91 | MYH9 Myosin-9 | 1346 |
| P13995_C166 | MTHFD2 Bifunctional | 1347 |
| | methylenetetrahydrofolate | |
| | dehydrogena | |
| P22102_C41 | GART Trifunctional purine | 1348 |
| | biosynthetic protein adenosin | |
| P0CW22_C35 | RPS17L 40S ribosomal protein | 1349 |
| | S17-like | |
| Q9UK45_C85 | LSM7 U6 snRNA-associated | 1350 |
| | Sm-like protein LSm7 | |
| Q12874_C274 | SF3A3 Splicing factor 3A | 1351 |
| | subunit 3 | |
| P34897_C119 | SHMT2 Serine | 1352 |
| | hydroxymethyltransferase, | |
| | mitochondrial | |
| P15153_C157 | RAC2 Ras-related C3 | 1353 |
| | botulinum toxin substrate 2 | |
| Q16186_C88 | ADRM1 Proteasomal ubiquitin | 1354 |
| | receptor ADRM1 | |
| P15531_C145 | NME1 Nucleoside diphosphate | 1355 |
| | kinase A | |
| P49327_C2202 | FASN Fatty acid synthase | 1356 |
| P40926_C275 | MDH2 Malate dehydrogenase, | 1357 |
| | mitochondrial | |
| P22314_C23 | UBA1 Ubiquitin-like modifier- | 1358 |
| | activating enzyme 1 | |
| P52789_C517 | HK2 Hexokinase-2 | 1359 |
| Q12931_C573 | TRAP1 Heat shock protein 75 | 1360 |
| | kDa, mitochondrial | |
| P39687_C123 | ANP32A Acidic leucine-rich | 1361 |
| | nuclear phosphoprotein 32 | |
| | fami | |
| O43865_C272 | AHCYL1 Putative | 1362 |
| | adenosylhomocysteinase 2 | |
| O95456_C157 | PSMG1 Proteasome assembly | 1363 |
| | chaperone 1 | |
| P49005_C384 | POLD2 DNA polymerase delta | 1364 |
| | subunit 2 | |
| Q96EY8_C132 | MMAB Cob(I)yrinic acid a,c- | 1365 |
| | diamide adenosyltransferase, | |
| P28074_C111 | PSMB5 Proteasome subunit | 1366 |
| | beta type-5 | |
| O75446_C184 | SAP30 Histone deacetylase | 1367 |
| | complex subunit SAP30 | |
| P05388_C27 | RPLP0 60S acidic ribosomal | 1368 |
| | protein P0 | |
| Q15366_C158 | PCBP2 Poly(rC)-binding | 1369 |
| | protein 2 | |
| O75369_C2501 | FLNB Filamin-B | 1370 |
| Q06124_C259 | PTPN11 Tyrosine-protein | 1371 |
| | phosphatase non-receptor type | |
| | 11 | |
| P40926_C285 | MDH2 Malate dehydrogenase, | 1372 |
| | mitochondrial | |
| Q9BV79_C263 | MECR Trans-2-enoyl-CoA | 1373 |
| | reductase, mitochondrial | |
| Q09666_C1900 | AHNAK Neuroblast | 1374 |
| | differentiation-associated | |
| | protein AHNA | |
| Q9UBB5_C359 | MBD2 Methyl-CpG-binding | 1375 |
| | domain protein 2 | |
| P32322_C262 | PYCR1 Pyrroline-5- | 1376 |
| | carboxylate reductase 1, | |
| | mitochondrial | |
| P31939_C241 | ATIC Bifunctional purine | 1377 |
| | biosynthesis protein PURH | |
| Q04917_C97 | YWHAH 14-3-3 protein eta | 1378 |
| P62753_C100 | RPS6 40S ribosomal protein | 1379 |
| | S6 | |
| Q9Y490_C1353 | TLN1 Talin-1 | 1380 |
| P52701_C615 | MSH6 DNA mismatch repair | 1381 |
| | protein Msh6 | |
| P49591_C300 | SARS Serine--tRNA ligase, | 1382 |
| | cytoplasmic | |
| P49411_C127 | TUFM Elongation factor Tu, | 1383 |
| | mitochondrial | |
| P51610_C227 | HCFC1 Host cell factor 1 | 1384 |
| P60174_C104 | TPI1 Triosephosphate | 1385 |
| | isomerase | |
| Q12982_C295 | BNIP2 BCL2/adenovirus E1B | 1386 |
| | 19 kDa protein-interacting pro | |
| Q9UHD8_C375 | SEPT9 Septin-9 | 1387 |
| P53618_C888 | COPB1 Coatomer subunit beta | 1388 |
| Q8N163_C644 | KIAA1967 DBIRD complex | 1389 |
| | subunit KIAA1967 | |
| P61106_C40 | RAB14 Ras-related protein | 1390 |
| | Rab-14 | |
| P21291_C167 | CSRP1 Cysteine and glycine- | 1391 |
| | rich protein 1 | |
| Q07020_C134 | RPL18 60S ribosomal protein | 1392 |
| | L18 | |
| Q86VP6_C413 | CAND1 Cullin-associated | 1393 |
| | NEDD8-dissociated protein 1 | |
| Q9Y3F4_C305 | STRAP Serine-threonine | 1394 |
| | kinase receptor-associated | |
| | protein | |
| Q9Y5K6_C540 | CD2AP CD2-associated | 1395 |
| | protein | |
| O60361_C130 | NME2P1 Putative nucleoside | 1396 |
| | diphosphate kinase | |
| Q9BWD1_C65 | ACAT2 Acetyl-CoA | 1397 |
| | acetyltransferase, cytosolic | |
| Q7L2J0_C522 | MEPCE 7SK snRNA | 1398 |
| | methylphosphate capping | |
| | enzyme | |
| P61158_C307 | ACTR3 Actin-related protein 3 | 1399 |
| P11142_C603 | HSPA8 Heat shock cognate 71 | 1400 |
| | kDa protein | |
| P13639_C728 | EEF2 Elongation factor 2 | 1401 |
| P04183_C206 | TK1 Thymidine kinase, | 1402 |
| | cytosolic | |
| P30153_C294 | PPP2R1A Serine/threonine- | 1403 |
| | protein phosphatase 2A 65 kDa | |
| | regulatory subunit A | |
| Q09666_C2162 | AHNAK Neuroblast | 1404 |
| | differentiation-associated | |
| | protein AHNA | |
| P46779_C13 | RPL28 60S ribosomal protein | 1405 |
| | L28 | |
| Q9Y696_C234 | CLIC4 Chloride intracellular | 1406 |
| | channel protein 4 | |
| P08670_C328 | VIM Vimentin | 1407 |
| O43684_C129 | BUB3 Mitotic checkpoint | 1408 |
| | protein BUB3 | |
| Q04917_C112 | YWHAH 14-3-3 protein eta | 1409 |
| P41252_C526 | IARS Isoleucine-tRNA ligase, | 1410 |
| | cytoplasmic | |
| O14980_C1070 | XPO1 Exportin-1 | 1411 |
| Q9Y3D5_C90 | MRPS18C 28S ribosomal | 1412 |
| | protein S18c, mitochondrial | |
| Q15459_C244 | SF3A1 Splicing factor 3A | 1413 |
| | subunit 1 | |
| P50552_C334 | VASP Vasodilator-stimulated | 1414 |
| | phosphoprotein | |
| Q04637_C1265 | EIF4G1 Eukaryotic translation | 1415 |
| | initiation factor 4 gamma 1 | |
| Q12824_C147 | SMARCB1 SWI/SNF-related | 1416 |
| | matrix-associated actin- | |
| | dependent | |
| P78346_C87 | RPP30 Ribonuclease P protein | 1417 |
| | subunit p30 | |
| Q99460_C806 | PSMD1 26S proteasome non- | 1418 |
| | ATPase regulatory subunit 1 | |
| P46060_C573 | RANGAP1 Ran GTPase- | 1419 |
| | activating protein 1 | |
| Q6P1X6_C98 | C8orf82 UPF0598 protein | 1420 |
| | C8orf82 | |
| P49189_C484 | ALDH9A1 4- | 1421 |
| | trimethylaminobutyraldehyde | |
| | dehydrogenase | |
| Q9NVG8_C36 | TBC1D13 TBC1 domain | 1422 |
| | family member 13 | |
| P49841_C199 | GSK3B Glycogen synthase | 1423 |
| | kinase-3 beta | |
| Q09666_C1833 | AHNAK Neuroblast | 1424 |
| | differentiation-associated | |
| | protein AHNA | |
| P62241_C182 | RPS8 40S ribosomal protein | 1425 |
| | S8 | |
| Q13620_C787 | CUL4B Cullin-4B | 1426 |
| P26599_C23 | PTBP1 Polypyrimidine tract- | 1427 |
| | binding protein 1 | |
| Q14697_C502 | GANAB Neutral alpha- | 1428 |
| | glucosidase AB | |
| P08238_C564 | HSP90AB1 Heat shock protein | 1429 |
| | HSP 90-beta | |
| P53582_C14 | METAP1 Methionine | 1430 |
| | aminopeptidase 1 | |
| Q9UBT2_C30 | UBA2 SUMO-activating | 1431 |
| | enzyme subunit 2 | |
| P06733_C119 | ENO1 Alpha-enolase | 1432 |
| P55884_C384 | EIF3B Eukaryotic translation | 1433 |
| | initiation factor 3 subunit | |
| P63167_C24 | DYNLL1 Dynein light chain 1, | 1434 |
| | cytoplasmic | |
| Q15417_C173 | CNN3 Calponin-3 | 1435 |
| P21980_C230 | TGM2 Protein-glutamine | 1436 |
| | gamma-glutamyltransferase 2 | |
| P31943_C122 | HNRNPH1 Heterogeneous | 1437 |
| | nuclear ribonucleoprotein H | |
| P31947_C38 | SFN 14-3-3 protein sigma | 1438 |
| P18085_C159 | ARF4 ADP-ribosylation factor | 1439 |
| | 4 | |
| P60174_C124 | TPI1 Triosephosphate | 1440 |
| | isomerase | |
| P14618_C152 | PKM Pyruvate kinase | 1441 |
| | isozymes M1/M2 | |
| Q12765_C324 | SCRN1 Secernin-1 | 1442 |
| Q16555_C179 | DPYSL2 | 1443 |
| | Dihydropyrimidinase-related | |
| | protein 2 | |
| P35579_C1379 | MYH9 Myosin-9 | 1444 |
| P07814_C92 | EPRS Bifunctional | 1445 |
| | glutamate/proline--tRNA | |
| | ligase | |
| Q92597_C168 | NDRG1 Protein NDRG1 | 1446 |
| O43707_C351 | ACTN4 Alpha-actinin-4 | 1447 |
| Q7RTV0_C49 | PHF5A PHD finger-like | 1448 |
| | domain-containing protein 5A | |
| P53396_C845 | ACLY ATP-citrate synthase | 1449 |
| P17844_C234 | DDX5 Probable ATP- | 1450 |
| | dependent RNA helicase | |
| | DDX5 | |
| Q9H0C8_C325 | ILKAP Integrin-linked kinase- | 1451 |
| | associated serine/threonine | |
| P11413_C446 | G6PD Glucose-6-phosphate 1- | 1452 |
| | dehydrogenase | |
| Q9BTT0_C87 | ANP32E Acidic leucine-rich | 1453 |
| | nuclear phosphoprotein 32 | |
| | family member # | |
| Q14258_C70 | TRIM25 E3 ubiquitin/ISG15 | 1454 |
| | ligase TRIM25 | |
| Q8WU79_C196 | SMAP2 Stromal membrane- | 1455 |
| | associated protein 2 | |
| Q92947_C289 | GCDH Glutaryl-CoA | 1456 |
| | dehydrogenase, mitochondrial | |
| P45974_C195 | USP5 Ubiquitin carboxyl- | 1457 |
| | terminal hydrolase 5 | |
| Q9BXJ9_C817 | NAA15 N-alpha- | 1458 |
| | acetyltransferase 15, NatA | |
| | auxiliary subun | |
| P62330_C155 | ARF6 ADP-ribosylation factor | 1459 |
| | 6 | |
| Q13501_C27 | SQSTM1 Sequestosome-1 | 1460 |
| Q5VWZ2_C12 | LYPLAL1 | 1461 |
| | Lysophospholipase-like | |
| | protein 1 | |
| Q04206_C105 | RELA Transcription factor p65 | 1462 |
| P36551_C198 | CPOX Coproporphyrinogen- | 1463 |
| | III oxidase, mitochondrial | |
| P25398_C69 | RPS12 40S ribosomal protein | 1464 |
| | S12 | |
| Q00839_C648 | HNRNPU Heterogeneous | 1465 |
| | nuclear ribonucleoprotein U | |
| P24752_C142 | ACAT1 Acetyl-CoA | 1466 |
| | acetyltransferase, | |
| | mitochondrial | |
| P02545_C522 | LMNA Prelamin-A/C | 1467 |
| O60763_C678 | USO1 General vesicular | 1468 |
| | transport factor p115 | |
| P04637_C182 | TP53 Cellular tumor antigen | 1469 |
| | p53 | |
| Q9UHX1_C129 | PUF60 Poly(U)-binding- | 1470 |
| | splicing factor PUF60 | |
| Q9Y383_C348 | LUC7L2 Putative RNA- | 1471 |
| | binding protein Luc7-like 2 | |
| P78371_C289 | CCT2 T-complex protein 1 | 1472 |
| | subunit beta | |
| Q15149_C4494 | PLEC Plectin | 1473 |
| P13639_C369 | EEF2 Elongation factor 2 | 1474 |
| P61163_C34 | ACTR1A Alpha-centractin | 1475 |
| Q7Z2W4_C645 | ZC3HAV1 Zinc finger CCCH- | 1476 |
| | type antiviral protein 1 | |
| P23526_C421 | AHCY | 1477 |
| | Adenosylhomocysteinase | |
| Q9P2T1_C348 | GMPR2 GMP reductase 2 | 1478 |
| Q12849_C476 | GRSF1 G-rich sequence factor | 1479 |
| | 1 | |
| P07814_C744 | EPRS Bifunctional | 1480 |
| | glutamate/proline--tRNA | |
| | ligase | |
| Q9ULA0_C327 | DNPEP Aspartyl | 1481 |
| | aminopeptidase | |
| Q01081_C67 | U2AF1 Splicing factor U2AF | 1482 |
| | 35 kDa subunit | |
| P53041_C11 | PPP5C Serine/threonine- | 1483 |
| | protein phosphatase 5 | |
| P63244_C138 | GNB2L1 Guanine nucleotide- | 1484 |
| | binding protein subunit beta-2- | |
| Q06323_C106 | PSME1 Proteasome activator | 1485 |
| | complex subunit 1 | |
| O95071_C730 | UBR5 E3 ubiquitin-protein | 1486 |
| | ligase UBR5 | |
| Q9H0D6_C736 | XRN2 5-3 exoribonuclease 2 | 1487 |
| P00558_C50 | PGK1 Phosphoglycerate | 1488 |
| | kinase 1 | |
| P52272_C114 | HNRNPM Heterogeneous | 1489 |
| | nuclear ribonucleoprotein M | |
| Q92598_C34 | HSPH1 Heat shock protein 105 | 1490 |
| | kDa | |
| P51858_C12 | HDGF Hepatoma-derived | 1491 |
| | growth factor | |
| Q9UBN7_C426 | HDAC6 Histone deacetylase 6 | 1492 |
| P09234_C25 | SNRPC U1 small nuclear | 1493 |
| | ribonucleoprotein C | |
| Q9P1F3_C39 | ABRACL Costars family | 1494 |
| | protein ABRACL | |
| P61158_C34 | ACTR3 Actin-related protein 3 | 1495 |
| P13639_C812 | EEF2 Elongation factor 2 | 1496 |
| B0V043_C41 | VARS Valyl-tRNA synthetase | 1497 |
| Q9NQT5_C215 | EXOSC3 Exosome complex | 1498 |
| | component RRP40 | |
| Q6PJG6_C539 | BRAT1 BRCA1-associated | 1499 |
| | ATM activator 1 | |
| H3BN98_C196 | Uncharacterized protein | 1500 |
| P35998_C389 | PSMC2 26S protease | 1501 |
| | regulatory subunit 7 | |
| P41250_C616 | GARS Glycine--tRNA ligase | 1502 |
| Q9Y5Y2_C269 | NUBP2 Cytosolic Fe—S cluster | 1503 |
| | assembly factor NUBP2 | |
| P31948_C26 | STIP1 Stress-induced- | 1504 |
| | phosphoprotein 1 | |
| Q99575_C705 | POP1 Ribonucleases P/MRP | 1505 |
| | protein subunit POP1 | |
| O00429_C470 | DNM1L Dynamin-1-like | 1506 |
| | protein | |
| O43264_C568 | ZW10 Centromere/kinetochore | 1507 |
| | protein zw10 homolog | |
| Q99961_C277 | SH3GL1 Endophilin-A2 | 1508 |
| Q99460_C898 | PSMD1 26S proteasome non- | 1509 |
| | ATPase regulatory subunit 1 | |
| P49411_C290 | TUFM Elongation factor Tu, | 1510 |
| | mitochondrial | |
| P21980_C370 | TGM2 Protein-glutamine | 1511 |
| | gamma-glutamyltransferase 2 | |
| P21980_C545 | TGM2 Protein-glutamine | 1512 |
| | gamma-glutamyltransferase 2 | |
| O00273_C154 | DFFA DNA fragmentation | 1513 |
| | factor subunit alpha | |
| P09936_C152 | UCHL1 Ubiquitin carboxyl- | 1514 |
| | terminal hydrolase isozyme L1 | |
| Q66K74_C440 | MAP1S Microtubule- | 1515 |
| | associated protein 1S | |
| Q9Y305_C155 | ACOT9 Acyl-coenzyme A | 1516 |
| | thioesterase 9, mitochondrial | |
| P17655_C105 | CAPN2 Calpain-2 catalytic | 1517 |
| | subunit | |
| P17655_C301 | CAPN2 Calpain-2 catalytic | 1518 |
| | subunit | |
| P35611_C525 | ADD1 Alpha-adducin | 1519 |
| P14625_C645 | HSP90B1 Endoplasmin | 1520 |
| O95571_C34 | ETHE1 Protein ETHE1, | 1521 |
| | mitochondrial | |
| P62241_C100 | RPS8 40S ribosomal protein | 1522 |
| | S8 | |
| P22061_C95 | PCMT1 Protein-L- | 1523 |
| | isoaspartate(D-aspartate) O- | |
| | methyltransferase | |
| P19367_C813 | HK1 Hexokinase-1 | 1524 |
| P20073_C363 | ANXA7 Annexin A7 | 1525 |
| O95486_C704 | SEC24A Protein transport | 1526 |
| | protein Sec24A | |
| P27816_C535 | MAP4 Microtubule-associated | 1527 |
| | protein 4 | |
| Q08J23_C93 | NSUN2 tRNA (cytosine(34)- | 1528 |
| | C(5))-methyltransferase | |
| Q9NSD9_C195 | FARSB Phenylalanine--tRNA | 1529 |
| | ligase beta subunit | |
| Q9GZZ9_C250 | UBA5 Ubiquitin-like modifier- | 1530 |
| | activating enzyme 5 | |
| P41240_C290 | CSK Tyrosine-protein kinase | 1531 |
| | CSK | |
| P00492_C23 | HPRT1 Hypoxanthine-guanine | 1532 |
| | phosphoribosyltransferase | |
| Q99714_C58 | HSD17B10 3-hydroxyacyl- | 1533 |
| | CoA dehydrogenase type-2 | |
| P27707_C59 | DCK Deoxycytidine kinase | 1534 |
| P19784_C336 | CSNK2A2 Casein kinase II | 1535 |
| | subunit alpha | |
| P50914_C42 | RPL14 60S ribosomal protein | 1536 |
| | L14 | |
| Q8WVJ2_C14 | NUDCD2 NudC domain- | 1537 |
| | containing protein 2 | |
| Q02543_C22 | RPL18A 60S ribosomal | 1538 |
| | protein L18a | |
| Q6YN16_C218 | HSDL2 Hydroxysteroid | 1539 |
| | dehydrogenase-like protein 2 | |
| Q9UHD8_C248 | SEPT9 Septin-9 | 1540 |
| P22314_C1040 | UBA1 Ubiquitin-like modifier- | 1541 |
| | activating enzyme 1 | |
| Q15020_C670 | SART3 Squamous cell | 1542 |
| | carcinoma antigen recognized | |
| | by T-cells 3 | |
| O15144_C120 | ARPC2 Actin-related protein | 1543 |
| | 2/3 complex subunit 2 | |
| Q9UNM6_C357 | PSMD13 26S proteasome non- | 1544 |
| | ATPase regulatory subunit 13 | |
| P30040_C157 | ERP29 Endoplasmic reticulum | 1545 |
| | resident protein 29 | |
| Q96Q11_C373 | TRNT1 CCA tRNA | 1546 |
| | nucleotidyltransferase 1, | |
| | mitochondrial | |
| Q02750_C277 | MAP2K1 Dual specificity | 1547 |
| | mitogen-activated protein | |
| | kinase | |
| P27816_C635 | MAP4 Microtubule-associated | 1548 |
| | protein 4 | |
| Q13185_C69 | CBX3 Chromobox protein | 1549 |
| | homolog 3 | |
| P21291_C40 | CSRP1 Cysteine and glycine- | 1550 |
| | rich protein 1 | |
| P55072_C535 | VCP Transitional endoplasmic | 1551 |
| | reticulum ATPase | |
| P55072_C572 | VCP Transitional endoplasmic | 1552 |
| | reticulum ATPase | |
| P39687_C87 | ANP32A Acidic leucine-rich | 1553 |
| | nuclear phosphoprotein 32 | |
| | family | |
| Q9Y314_C8 | NOSIP Nitric oxide synthase- | 1554 |
| | interacting protein | |
| Q9UBT2_C173 | UBA2 SUMO-activating | 1555 |
| | enzyme subunit 2 | |
| P34897_C91 | SHMT2 Serine | 1556 |
| | hydroxymethyltransferase, | |
| | mitochondrial | |
| O00299_C178 | CLIC1 Chloride intracellular | 1557 |
| | channel protein 1 | |
| Q9Y570_C238 | PPME1 Protein phosphatase | 1558 |
| | methylesterase 1 | |
| P61927_C19 | RPL37 60S ribosomal protein | 1559 |
| | L37 | |
| O75153_C1196 | KIAA0664 Clustered | 1560 |
| | mitochondria protein homolog | |
| P23919_C31 | DTYMK Thymidylate kinase | 1561 |
| P40121_C290 | CAPG Macrophage-capping | 1562 |
| | protein | |
| A0AVT1_C433 | UBA6 Ubiquitin-like modifier- | 1563 |
| | activating enzyme 6 | |
| Q15365_C201 | PCBP1 Poly(rC)-binding | 1564 |
| | protein 1 | |
| P29401_C386 | TKT Transketolase | 1565 |
| P48147_C25 | PREP Prolyl endopeptidase | 1566 |
| Q01813_C411 | PFKP 6-phosphofructokinase | 1567 |
| | type C | |
| P21333_C2543 | FLNA Filamin-A | 1568 |
| P21333_C2601 | FLNA Filamin-A | 1569 |
| O00154_C288 | ACOT7 Cytosolic acyl | 1570 |
| | coenzyme A thioester | |
| | hydrolase | |
| P27635_C195 | RPL10 60S ribosomal protein | 1571 |
| | L10 | |
| P26038_C117 | MSN Moesin | 1572 |
| Q96HE7_C208 | ERO1L ERO1-like protein | 1573 |
| | alpha | |
| P12814_C480 | ACTN1 Alpha-actinin-1 | 1574 |
| P07203_C202 | GPX1 Glutathione peroxidase | 1575 |
| | 1 | |
| Q99497_C46 | PARK7 Protein DJ-1 | 1576 |
| Q9HAV4_C1131 | XPO5 Exportin-5 | 1577 |
| Q9UJX3_C131 | ANAPC7 Anaphase-promoting | 1578 |
| | complex subunit 7 | |
| O75821_C139 | EIF3G Eukaryotic translation | 1579 |
| | initiation factor 3 subunit | |
| P00338_C131 | LDHA L-lactate | 1580 |
| | dehydrogenase A chain | |
| Q15102_C55 | PAFAH1B3 Platelet-activating | 1581 |
| | factor acetylhydrolase IB subu | |
| Q1KMD3_C308 | HNRNPUL2 Heterogeneous | 1582 |
| | nuclear ribonucleoprotein U- | |
| | like protein 2 | |
| P54886_C88 | ALDH18A1 Delta-1-pyrroline- | 1583 |
| | 5-carboxylate synthase | |
| Q5VSL9_C798 | FAM40A Protein FAM40A | 1584 |
| P30084_C213 | ECHS1 Enoyl-CoA hydratase, | 1585 |
| | mitochondrial | |
| P30086_C168 | PEBP1 | 1586 |
| | Phosphatidylethanolamine- | |
| | binding protein 1 | |
| Q9Y3D0_C158 | FAM96B Mitotic spindle- | 1587 |
| | associated MMXD complex | |
| | subunit MI | |
| P49589_C204 | CARS Cysteine--tRNA ligase, | 1588 |
| | cytoplasmic | |
| Q15366_C217 | PCBP2 Poly(rC)-binding | 1589 |
| | protein 2 | |
| O75369_C2556 | FLNB Filamin-B | 1590 |
| Q16181_C126 | SEPT7 Septin-7 | 1591 |
| Q99661_C245 | KIF2C Kinesin-like protein | 1592 |
| | KIF2C | |
| Q9UHD1_C86 | CHORDC1 Cysteine and | 1593 |
| | histidine-rich domain- | |
| | containing protein | |
| P0CB43_C368 | FAM203B Protein FAM203B | 1594 |
| P40925_C137 | MDH1 Malate dehydrogenase, | 1595 |
| | cytoplasmic | |
| Q12888_C1933 | TP53BP1 Tumor suppressor | 1596 |
| | p53-binding protein 1 | |
| Q14247_C112 | CTTN Src substrate cortactin | 1597 |
| Q13200_C251 | PSMD2 26S proteasome non- | 1598 |
| | ATPase regulatory subunit 2 | |
| P13639_C591 | EEF2 Elongation factor 2 | 1599 |
| P27816_C126 | MAP4 Microtubule-associated | 1600 |
| | protein 4 | |
| P48739_C187 | PITPNB Phosphatidylinositol | 1601 |
| | transfer protein beta isoform | |
| P14866_C472 | HNRNPL Heterogeneous | 1602 |
| | nuclear ribonucleoprotein L | |
| P07237_C343 | P4HB Protein disulfide- | 1603 |
| | isomerase | |
| O43708_C205 | GSTZ1 Maleylacetoacetate | 1604 |
| | isomerase | |
| P19623_C25 | SRM Spermidine synthase | 1605 |
| P56537_C56 | EIF6 Eukaryotic translation | 1606 |
| | initiation factor 6 | |
| Q96SW2_C188 | CRBN Protein cereblon | 1607 |
| P41240_C31 | CSK Tyrosine-protein kinase | 1608 |
| | CSK | |
| P36551_C127 | CPOX Coproporphyrinogen- | 1609 |
| | III oxidase, mitochondrial | |
| P52292_C133 | KPNA2 Importin subunit | 1610 |
| | alpha-2 | |
| Q04637_C1516 | EIF4G1 Eukaryotic translation | 1611 |
| | initiation factor 4 gamma 1 | |
| P60981_C80 | DSTN Destrin | 1612 |
| Q7RTV0_C40 | PHF5A PHD finger-like | 1613 |
| | domain-containing protein 5A | |
| P19838_C61 | NFKB1 Nuclear factor NF- | 1614 |
| | kappa-B p105 subunit | |
| P53396_C633 | ACLY ATP-citrate synthase | 1615 |
| P49207_C83 | RPL34 60S ribosomal protein | 1616 |
| | L34 | |
| Q14974_C689 | KPNB1 Importin subunit beta- | 1617 |
| | 1 | |
| Q96I99_C162 | SUCLG2 Succinyl-CoA ligase | 1618 |
| P51610_C1139 | HCFC1 Host cell factor 1 | 1619 |
| Q14657_C23 | LAGE3 L antigen family | 1620 |
| | member 3 | |
| P13639_C290 | EEF2 Elongation factor 2 | 1621 |
| P22314_C481 | UBA1 Ubiquitin-like modifier- | 1622 |
| | activating enzyme 1 | |
| Q52LJ0_C295 | FAM98B Protein FAM98B | 1623 |
| Q7Z2W4_C38 | ZC3HAV1 Zinc finger CCCH- | 1624 |
| | type antiviral protein 1 | |
| P26447_C81 | S100A4 Protein S100-A4 | 1625 |
| P30041_C47 | PRDX6 Peroxiredoxin-6 | 1626 |
| P04040_C377 | CAT Catalase | 1627 |
| Q14847_C20 | LASP1 LIM and SH3 domain | 1628 |
| | protein 1 | |
| P55209_C88 | NAP1L1 Nucleosome | 1629 |
| | assembly protein 1-like 1 | |
| Q9NRP4_C80 | ACN9 Protein ACN9 | 1630 |
| | homolog, mitochondrial | |
| P17987_C385 | TCP1 T-complex protein 1 | 1631 |
| | subunit alpha | |
| P13797_C104 | PLS3 Plastin-3 | 1632 |
| Q7Z434_C33 | MAVS Mitochondrial | 1633 |
| | antiviral-signaling protein | |
| P49915_C489 | GMPS GMP synthase K | 1634 |
| Q9H814_C51 | PHAX Phosphorylated adapter | 1635 |
| | RNA export protein | |
| Q15181_C274 | PPA1 Inorganic | 1636 |
| | pyrophosphatase | |
| Q9UPN7_C795 | PPP6R1 Serine/threonine- | 1637 |
| | protein phosphatase 6 | |
| | regulatory | |
| P50395_C202 | GDI2 Rab GDP dissociation | 1638 |
| | inhibitor beta | |
| P27695_C296 | APEX1 DNA-(apurinic or | 1639 |
| | apyrimidinic site) lyase | |
| P13010_C493 | XRCC5 X-ray repair cross- | 1640 |
| | complementing protein 5 | |
| P27635_C49 | RPL10 60S ribosomal protein | 1641 |
| | L10 | |
| Q9BZE9_C109 | ASPSCR1 Tether containing | 1642 |
| | UBX domain for GLUT4 | |
| P43487_C99 | RANBP1 Ran-specific | 1643 |
| | GTPase-activating protein | |
| P78527_C1904 | PRKDC DNA-dependent | 1644 |
| | protein kinase catalytic subunit | |
| Q6JBY9_C155 | RCSD1 CapZ-interacting | 1645 |
| | protein | |
| P14625_C576 | HSP90B1 Endoplasmin | 1646 |
| Q8N806_C260 | UBR7 Putative E3 ubiquitin- | 1647 |
| | protein ligase UBR7 | |
| Q9GZT9_C127 | EGLN1 Egl nine homolog 1 | 1648 |
| P06744_C404 | GPI Glucose-6-phosphate | 1649 |
| | isomerase | |
| P00390_C102 | GSR Glutathione reductase, | 1650 |
| | mitochondrial | |
| P25398_C106 | RPS12 40S ribosomal protein | 1651 |
| | S12 | |
| Q00839_C497 | HNRNPU Heterogeneous | 1652 |
| | nuclear ribonucleoprotein U | |
| P49368_C455 | CCT3 T-complex protein 1 | 1653 |
| | subunit gamma | |
| P33993_C482 | MCM7 DNA replication | 1654 |
| | licensing factor MCM7 | |
| P57764_C191 | GSDMD Gasdermin-D | 1655 |
| P40222_C523 | TXLNA Alpha-taxilin | 1656 |
| Q9NTZ6_C887 | RBM12 RNA-binding protein | 1657 |
| | 12 | |
| Q9Y617_C80 | PSAT1 Phosphoserine | 1658 |
| | aminotransferase | |
| P27695_C99 | APEX1 DNA-(apurinic or | 1659 |
| | apyrimidinic site) lyase | |
| Q7Z6Z7_C3239 | HUWE1 E3 ubiquitin-protein | 1660 |
| | ligase HUWE1 | |
| Q16644_C203 | MAPKAPK3 MAP kinase- | 1661 |
| | activated protein kinase 3 | |
| O15355_C13 | PPM1G Protein phosphatase | 1662 |
| | 1G | |
| Q15149_C3821 | PLEC Plectin | 1663 |
| O94776_C209 | MTA2 Metastasis-associated | 1664 |
| | protein MTA2 | |
| A6NHG4_C24 | DDTL D-dopachrome | 1665 |
| | decarboxylase-like protein | |
| P356I1_C430 | ADD1 Alpha-adducin | 1666 |
| Q9NVA2_C41 | SEPT11 Septin-11 | 1667 |
| P19404_C225 | NDUFV2 NADH | 1668 |
| | dehydrogenase | |
| P35579_C569 | MYH9 Myosin-9 | 1669 |
| P19367_C834 | HK1 Hexokinase-1 | 1670 |
| P30041_C91 | PRDX6 Peroxiredoxin-6 | 1671 |
| P21281_C162 | ATP6V1B2 V-type proton | 1672 |
| | ATPase subunit B, brain | |
| | isoform | |
| P13796_C42 | LCP1 Plastin-2 | 1673 |
| O00410_C687 | IPO5 Importin-5 | 1674 |
| P49207_C49 | RPL34 60S ribosomal protein | 1675 |
| | L34 | |
| P35658_C186 | NUP214 Nuclear pore | 1676 |
| | complex protein Nup214 | |
| P17858_C170 | PFKL 6-phosphofructokinase, | 1677 |
| | liver type | |
| P21333_C574 | FLNA Filamin-A | 1678 |
| O60701_C241 | UGDH UDP-glucose 6- | 1679 |
| | dehydrogenase | |
| Q15691_C228 | MAPRE1 Microtubule- | 1680 |
| | associated protein RP/EB | |
| | family member | |
| P31153_C104 | MAT2A S- | 1681 |
| | adenosylmethionine synthase | |
| | isoform type-2 | |
| Q14247_C246 | CTTN Src substrate cortactin | 1682 |
| Q8IWX8_C69 | CHERP Calcium homeostasis | 1683 |
| | endoplasmic reticulum protein | |
| Q99543_C394 | DNAJC2 DnaJ homolog | 1684 |
| | subfamily C member 2 | |
| Q6JBY9_C181 | RCSD1 CapZ-interacting | 1685 |
| | protein | |
| P12814_C41 | ACTN1 Alpha-actinin-1 | 1686 |
| P17812_C491 | CTPS1 CTP synthase 1 | 1687 |
| E7ETI0_C21 | ARPC4-TTLL3 Protein | 1688 |
| | ARPC4-TTLL3 | |
| Q9ULC4_C14 | MCTS1 Malignant T-cell- | 1689 |
| | amplified sequence 1 | |
| P08134_C16 | RHOC Rho-related GTP- | 1690 |
| | binding protein RhoC | |
| Q14980_C80 | NUMA1 Nuclear mitotic | 1691 |
| | apparatus protein 1 | |
| Q9NYL9_C231 | TMOD3 Tropomodulin-3 | 1692 |
| Q99439_C61 | CNN2 Calponin-2 | 1693 |
| P46776_C144 | RPL27A 60S ribosomal | 1694 |
| | protein L27a | |
| O14980_C164 | XPO1 Exportin-1 | 1695 |
| Q9Y2L1_C213 | DIS3 Exosome complex | 1696 |
| | exonuclease RRP44 | |
| O60502_C596 | MGEA5 Bifunctional protein | 1697 |
| | NCOAT | |
| P49748_C237 | ACADVL Very long-chain | 1698 |
| | specific acyl-CoA | |
| | dehydrogenase, mitochondrial | |
| O76003_C146 | GLRX3 Glutaredoxin-3 | 1699 |
| P27797_C163 | CALR Calreticulin | 1700 |
| P49368_C279 | CCT3 T-complex protein 1 | 1701 |
| | subunit gamma | |
| P32119_C172 | PRDX2 Peroxiredoxin-2 | 1702 |
| O15541_C15 | RNF113A RING finger protein | 1703 |
| | 113A | |
| Q15417_C59 | CNN3 Calponin-3 | 1704 |
| P60981_C135 | DSTN Destrin | 1705 |
| P36776_C682 | LONP1 Lon protease homolog, | 1706 |
| | mitochondrial | |
| P13693_C28 | TPT1 Translationally- | 1707 |
| | controlled tumor protein | |
| B5ME19_C444 | EIF3CL Eukaryotic translation | 1708 |
| | initiation factor 3 subunit | |
| Q93009_C223 | USP7 Ubiquitin carboxyl- | 1709 |
| | terminal hydrolase 7 | |
| Q9UPQ0_C669 | LIMCH1 LIM and calponin | 1710 |
| | homology domains-containing | |
| | prote | |
| Q96EY4_C162 | TMA16 Translation | 1711 |
| | machinery-associated protein | |
| | 16 | |
| Q9BSH5_C243 | HDHD3 Haloacid | 1712 |
| | dehalogenase-like hydrolase | |
| | domain-contai | |
| Q99832_C450 | CCT7 T-complex protein I | 1713 |
| | subunit eta | |
| P68366_C129 | TUBA4A Tubulin alpha-4A | 1714 |
| | chain | |
| Q6IS14_C73 | EIF5AL1 Eukaryotic | 1715 |
| | translation initiation factor 5A- | |
| | 1-like | |
| P52907_C157 | CAPZA1 F-actin-capping | 1716 |
| | protein subunit alpha-1 | |
| P78527_C25 | PRKDC DNA-dependent | 1717 |
| | protein kinase catalytic subunit | |
| O43592_C650 | XPOT Exportin-T | 1718 |
| P49459_C88 | UBE2A Ubiquitin-conjugating | 1719 |
| | enzyme E2 A | |
| Q9UEW8_C237 | STK39 STE20/SPS1-related | 1720 |
| | proline-alanine-rich protein ki | |
| Q92888_C537 | ARHGEF1 Rho guanine | 1721 |
| | nucleotide exchange factor 1 | |
| P17812_C362 | CTPS1 CTP synthase 1 | 1722 |
| Q8IY67_C255 | RAVER1 Ribonucleoprotein | 1723 |
| | PTB-binding 1 | |
| Q13547_C408 | HDAC1 Histone deacetylase 1 | 1724 |
| P00505_C106 | GOT2 Aspartate | 1725 |
| | aminotransferase, | |
| | mitochondrial | |
| P35579_C816 | MYH9 Myosin-9 | 1726 |
| O00148_C197 | DDX39A ATP-dependent | 1727 |
| | RNA helicase DDX39A | |
| Q14192_C150 | FHL2 Four and a half LIM | 1728 |
| | domains protein 2 | |
| Q14204_C633 | DYNC1H1 Cytoplasmic | 1729 |
| | dynein 1 heavy chain 1 | |
| P07814_C1487 | EPRS Bifunctional | 1730 |
| | glutamate/proline--tRNA | |
| | ligase | |
| P27816_C1098 | MAP4 Microtubule-associated | 1731 |
| | protein 4 | |
| P61586_C107 | RHOA Transforming protein | 1732 |
| | RhoA | |
| Q08J23_C673 | NSUN2 tRNA (cytosine(34)- | 1733 |
| | C(5))-methyltransferase | |
| P53041_C77 | PPP5C Serine/threonine- | 1734 |
| | protein phosphatase 5 | |
| O43707_C173 | ACTN4 Alpha-actinin-4 | 1735 |
| Q06210_C55 | GFPT1 Glucosamine-- | 1736 |
| | fructose-6-phosphate | |
| | aminotransferase | |
| P06400_C853 | RB1 Retinoblastoma- | 1737 |
| | associated protein | |
| Q9BUJ2_C391 | HNRNPUL1 Heterogeneous | 1738 |
| | nuclear ribonucleoprotein U- | |
| | like protein | |
| E7EVH7_C286 | KLC1 Kinesin light chain 1 | 1739 |
| Q68CZ2_C1241 | TNS3 Tensin-3 | 1740 |
| Q9Y5Y2_C72 | NUBP2 Cytosolic Fe—S cluster | 1741 |
| | assembly factor NUBP2 | |
| P11498_C850 | PC Pyruvate carboxylase, | 1742 |
| | mitochondrial | |
| Q9BXS6_C256 | NUSAP1 Nucleolar and | 1743 |
| | spindle-associated protein 1 | |
| P56192_C38 | MARS Methionine--tRNA | 1744 |
| | ligase, cytoplasmic | |
| P35914_C323 | HMGCL | 1745 |
| | Hydroxymethylglutaryl-CoA | |
| | lyase, mitochondrial | |
| P00367_C172 | GLUD1 Glutamate | 1746 |
| | dehydrogenase 1, | |
| | mitochondrial | |
| Q99873_C350 | PRMT1 Protein arginine N- | 1747 |
| | methyltransferase 1 | |
| P15170_C276 | GSPT1 Eukaryotic peptide | 1748 |
| | chain release factor GTP- | |
| | bindin | |
| Q13838_C165 | DDX39B Spliceosome RNA | 1749 |
| | helicase DDX39B | |
| O75369_C1617 | FLNB Filamin-B | 1750 |
| Q96RU3_C609 | FNBP1 Formin-binding | 1751 |
| | protein 1 | |
| P16333_C266 | NCK1 Cytoplasmic protein | 1752 |
| | NCK1 | |
| P35250_C88 | RFC2 Replication factor C | 1753 |
| | subunit 2 | |
| Q9BSD7_C184 | NTPCR Cancer-related | 1754 |
| | nucleoside-triphosphatase | |
| P13489_C142 | RNH1 Ribonuclease inhibitor | 1755 |
| P26639_C343 | TARS Threonine--tRNA | 1756 |
| | ligase, cytoplasmic | |
| P31153_C56 | MAT2A S- | 1757 |
| | adenosylmethionine synthase | |
| | isoform type-2 | |
| P01591_C131 | IGJ Immunoglobulin J chain | 1758 |
| P07858_C93 | CTSB Cathepsin B | 1759 |
| P62191_C399 | PSMC1 26S protease | 1760 |
| | regulatory subunit 4 | |
| P85037_C439 | FOXK1 Forkhead box protein | 1761 |
| | K1 | |
| Q96EY7_C642 | PTCD3 Pentatricopeptide | 1762 |
| | repeat-containing protein 3, | |
| | mitochondrial | |
| P78417_C192 | GSTO1 Glutathione S- | 1763 |
| | transferase omega-1 | |
| O75694_C704 | NUP155 Nuclear pore | 1764 |
| | complex protein Nup155 | |
| Q9NZD2_C36 | GLTP Glycolipid transfer | 1765 |
| | protein | |
| Q9NR45_C287 | NANS Sialic acid synthase | 1766 |
| P52788_C318 | SMS Spermine synthase | 1767 |
| P52788_C337 | SMS Spermine synthase | 1768 |
| P37837_C250 | TALDO1 Transaldolase | 1769 |
| Q9UBB4_C283 | ATXN10 Ataxin-10 | 1770 |
| Q14204_C1888 | DYNC1H1 Cytoplasmic | 1771 |
| | dynein 1 heavy chain 1 | |
| P14866_C452 | HNRNPL Heterogeneous | 1772 |
| | nuclear ribonucleoprotein L | |
| P56537_C15 | EIF6 Eukaryotic translation | 1773 |
| | initiation factor 6 | |
| Q9Y5Y2_C54 | NUBP2 Cytosolic Fe—S cluster | 1774 |
| | assembly factor NUBP2 | |
| P28838_C445 | LAP3 Cytosol aminopeptidase | 1775 |
| P31350_C317 | RRM2 Ribonucleoside- | 1776 |
| | diphosphate reductase subunit | |
| | M2 | |
| Q04637_C1384 | EIF4G1 Eukaryotic translation | 1777 |
| | initiation factor 4 gamma 1 | |
| P63167_C56 | DYNLL1 Dynein light chain 1, | 1778 |
| | cytoplasmic | |
| Q86WR0_C83 | CCDC25 Coiled-coil domain- | 1779 |
| | containing protein 25 | |
| P41227_C194 | NAA10 N-alpha- | 1780 |
| | acetyltransferase 10 | |
| Q9BY42_C262 | C20orf43 UPF0549 protein | 1781 |
| | C20orf43 | |
| Q9NVP2_C172 | ASF1B Histone chaperone | 1782 |
| | ASF1B | |
| Q8IZ07_C540 | ANKRD13A Ankyrin repeat | 1783 |
| | domain-containing protein 13A | |
| Q8IUI8_C154 | CRLF3 Cytokine receptor-like | 1784 |
| | factor 3 | |
| Q9H6S3_C543 | EPS8L2 Epidermal growth | 1785 |
| | factor receptor kinase substrate | |
| Q06124_C573 | PTPN11 Tyrosine-protein | 1786 |
| | phosphatase non-receptor type | |
| | 11 | |
| P62829_C125 | RPL23 60S ribosomal protein | 1787 |
| | L23 | |
| P55769_C93 | NHP2L1 NHP2-like protein 1 | 1788 |
| Q15233_C208 | NONO Non-POU domain- | 1789 |
| | containing octamer-binding | |
| | protein | |
| Q13200_C459 | PSMD2 26S proteasome non- | 1790 |
| | ATPase regulatory subunit 2 | |
| Q9ULZ2_C269 | STAP1 Signal-transducing | 1791 |
| | adaptor protein 1 | |
| P78527_C3403 | PRKDC DNA-dependent | 1792 |
| | protein kinase catalytic subunit | |
| Q9NZ63_C145 | C9orf78 Uncharacterized | 1793 |
| | protein C9orf78 | |
| P22234_C350 | PAICS Multifunctional protein | 1794 |
| | ADE2 | |
| Q9NX46_C132 | ADPRHL2 Poly(ADP-ribose) | 1795 |
| | glycohydrolase ARH3 | |
| Q6PJT7_C261 | ZC3H14 Zinc finger CCCH | 1796 |
| | domain-containing protein 14 | |
| P52789_C909 | HK2 Hexokinase-2 | 1797 |
| O00148_C86 | DDX39A ATP-dependent | 1798 |
| | RNA helicase DDX39A | |
| P48643_C302 | CCT5 T-complex protein 1 | 1799 |
| | subunit epsilon | |
| Q9H6Z4_C203 | RANBP3 Ran-binding protein | 1800 |
| | 3 | |
| P33991_C605 | MCM4 DNA replication | 1801 |
| | licensing factor MCM4 | |
| Q13330_C229 | MTA1 Metastasis-associated | 1802 |
| | protein MTA1 | |
| O95630_C264 | STAMBP STAM-binding | 1803 |
| | protein | |
| P25786_C85 | PSMA1 Proteasome subunit | 1804 |
| | alpha type-1 | |
| P42704_C1277 | LRPPRC Leucine-rich PPR | 1805 |
| | motif-containing protein, | |
| | mitochondrial | |
| Q9NR50_C106 | EIF2B3 Translation initiation | 1806 |
| | factor eIF-2B subunit gamma | |
| Q9H299_C71 | SH3BGRL3 SH3 domain- | 1807 |
| | binding glutamic acid-rich-like | |
| | protein | |
| Q32MZ4_C14 | LRRFIP1 Leucine-rich repeat | 1808 |
| | flightless-interacting protein | |
| Q13619_C633 | CUL4A Cullin-4A | 1809 |
| O75832_C107 | PSMD10 26S proteasome non- | 1810 |
| | ATPase regulatory subunit 10 | |
| O75874_C379 | IDH1 Isocitrate dehydrogenase | 1811 |
| P04075_C178 | ALDOA Fructose- | 1812 |
| | bisphosphate aldolase A | |
| P34897_C412 | SHMT2 Serine | 1813 |
| | hydroxymethyltransferase, | |
| | mitochondrial | |
| Q9Y490_C1939 | TLN1 Talin-1 | 1814 |
| P26358_C896 | DNMT1 DNA (cytosine-5)- | 1815 |
| | methyltransferase 1 | |
| P52701_C88 | MSH6 DNA mismatch repair | 1816 |
| | protein Msh6 | |
| Q96G03_C573 | PGM2 Phosphoglucomutase-2 | 1817 |
| O00410_C1078 | IPO5 Importin-5 | 1818 |
| Q96FW1_C91 | OTUB1 Ubiquitin thioesterase | 1819 |
| | OTUB1 | |
| P02545_C591 | LMNA Prelamin-A/C | 1820 |
| Q7Z5K2_C94 | WAPAL Wings apart-like | 1821 |
| | protein homolog | |
| O75369_C991 | FLNB Filamin-B | 1822 |
| Q969T9_C80 | WBP2 WW domain-binding | 1823 |
| | protein 2 | |
| Q9H773_C162 | DCTPP1 dCTP | 1824 |
| | pyrophosphatase 1 | |
| Q15424_C225 | SAFB Scaffold attachment | 1825 |
| | factor B1 | |
| P07900_C529 | HSP90AA1 Heat shock protein | 1826 |
| | HSP 90-alpha | |
| P23396_C134 | RPS3 40S ribosomal protein | 1827 |
| | S3 | |
| Q8N9N8_C89 | EIF1AD Probable RNA- | 1828 |
| | binding protein EIF1AD | |
| Q12888_C101 | TP53BP1 Tumor suppressor | 1829 |
| | p53-binding protein 1 | |
| P61970_C114 | NUTF2 Nuclear transport | 1830 |
| | factor 2 | |
| P18858_C895 | LIG1 DNA ligase 1 | 1831 |
| P13639_C693 | EEF2 Elongation factor 2 | 1832 |
| Q7L5D6_C160 | GET4 Golgi to ER traffic | 1833 |
| | protein 4 homolog | |
| P63104_C25 | YWHAZ 14-3-3 protein | 1834 |
| | zeta/delta | |
| Q14676_C26 | MDC1 Mediator of DNA | 1835 |
| | damage checkpoint protein 1 | |
| Q15021_C596 | NCAPD2 Condensin complex | 1836 |
| | subunit 1 | |
| O43815_C765 | STRN Striatin | 1837 |
| Q13310_C339 | PABPC4 Polyadenylate- | 1838 |
| | binding protein 4 | |
| P62241_C71 | RPS8 40S ribosomal protein | 1839 |
| | S8 | |
| Q9Y263_C584 | PLAA Phospholipase A-2- | 1840 |
| | activating protein | |
| O95801_C238 | TTC4 Tetratricopeptide repeat | 1841 |
| | protein 4 | |
| Q14192_C254 | FHL2 Four and a half LIM | 1842 |
| | domains protein 2 | |
| Q92841_C584 | DDX17 Probable ATP- | 1843 |
| | dependent RNA helicase | |
| | DDX17 | |
| P07814_C1148 | EPRS Bifunctional | 1844 |
| | glutamate/proline--tRNA | |
| | ligase | |
| P61586_C159 | RHOA Transforming protein | 1845 |
| | RhoA | |
| Q08J23_C221 | NSUN2 tRNA (cytosine(34)- | 1846 |
| | C(5))-methyltransferase | |
| Q9UER7_C699 | DAXX Death domain- | 1847 |
| | associated protein 6 | |
| P05161_C78 | ISG15 Ubiquitin-like protein | 1848 |
| | ISG15 | |
| P07741_C140 | APRT Adenine | 1849 |
| | phosphoribosyltransferase | |
| P08238_C412 | HSP90AB1 Heat shock protein | 1850 |
| | HSP 90-beta | |
| P53597_C60 | SUCLG1 Succinyl-CoA ligase | 1851 |
| Q9UPY8_C182 | MAPRE3 Microtubule- | 1852 |
| | associated protein RP/EB | |
| | family member | |
| P61247_C139 | RPS3A 40S ribosomal protein | 1853 |
| | S3a | |
| Q9Y2L1_C799 | DIS3 Exosome complex | 1854 |
| | exonuclease RRP44 | |
| P23921_C352 | RRM1 Ribonucleoside- | 1855 |
| | diphosphate reductase large | |
| | subunit | |
| P07954_C333 | FH Fumarate hydratase, | 1856 |
| | mitochondrial | |
| O00429_C361 | DNM1L Dynamin-1-like | 1857 |
| | protein | |
| P00491_C31 | PNP Purine nucleoside | 1858 |
| | phosphorylase | |
| P61927_C37 | RPL37 60S ribosomal protein | 1859 |
| | L37 | |
| Q16543_C336 | CDC37 Hsp90 co-chaperone | 1860 |
| | Cdc37 | |
| P49753_C401 | ACOT2 Acyl-coenzyme A | 1861 |
| | thioesterase 2, mitochondrial | |
| Q9BSH4_C256 | TACO1 Translational activator | 1862 |
| | of cytochrome c oxidase 1 | |
| P43686_C379 | PSMC4 26S protease | 1863 |
| | regulatory subunit 6B | |
| O75717_C285 | WDHD1 WD repeat and | 1864 |
| | HMG-box DNA-binding | |
| | protein 1 | |
| P36776_C520 | LONP1 Lon protease homolog, | 1865 |
| | mitochondrial | |
| P36776_C637 | LONP1 Lon protease homolog, | 1866 |
| | mitochondrial | |
| Q16666_C637 | IFI16 Gamma-interferon- | 1867 |
| | inducible protein 16 | |
| Q92619_C1020 | HMHA1 Minor | 1868 |
| | histocompatibility protein HA- | |
| | 1 | |
| Q9P289_C77 | MST4 Serine/threonine-protein | 1869 |
| | kinase MST4 | |
| H3BVE0_C63 | Uncharacterized protein | 1870 |
| P60891_C91 | PRPS1 Ribose-phosphate | 1871 |
| | pyrophosphokinase 1 | |
| Q01813_C343 | PFKP 6-phosphofructokinase | 1872 |
| | type C | |
| P04632_C144 | CAPNS1 Calpain small | 1873 |
| | subunit 1 | |
| Q7Z6Z7_C790 | HUWE1 E3 ubiquitin-protein | 1874 |
| | ligase HUWE1 | |
| O14933_C102 | UBE2L6 Ubiquitin/ISG15- | 1875 |
| | conjugating enzyme E2 L6 | |
| Q8WUA4_C212 | GTF3C2 General transcription | 1876 |
| | factor 3C polypeptide 2 | |
| Q9UJU6_C127 | DBNL Drebrin-like protein | 1877 |
| P21333_C2199 | FLNA Filamin-A | 1878 |
| P45880_C47 | VDAC2 Voltage-dependent | 1879 |
| | anion-selective channel protein | |
| P23396_C119 | RPS3 40S ribosomal protein | 1880 |
| | S3 | |
| P13489_C30 | RNH1 Ribonuclease inhibitor | 1881 |
| P17676_C248 | CEBPB CCAAT/enhancer- | 1882 |
| | binding protein beta | |
| Q92974_C478 | ARHGEF2 Rho guanine | 1883 |
| | nucleotide exchange factor 2 | |
| O75995_C351 | SASH3 SAM and SH3 | 1884 |
| | domain-containing protein 3 | |
| P61978_C184 | HNRNPK Heterogeneous | 1885 |
| | nuclear ribonucleoprotein K | |
| Q15149_C3295 | PLEC Plectin | 1886 |
| P11142_C574 | HSPA8 Heat shock cognate 71 | 1887 |
| | kDa protein | |
| P21964_C223 | COMT Catechol O- | 1888 |
| | methyltransferase | |
| Q96TA1_C466 | FAM129B Niban-like protein | 1889 |
| | 1 | |
| Q9NVG8_C145 | TBC1D13 TBC1 domain | 1890 |
| | family member 13 | |
| Q96EV2_C726 | RBM33 RNA-binding protein | 1891 |
| | 33 | |
| P00505_C295 | GOT2 Aspartate | 1892 |
| | aminotransferase, | |
| | mitochondrial | |
| Q92945_C436 | KHSRP Far upstream element- | 1893 |
| | binding protein 2 | |
| P46734_C227 | MAP2K3 Dual specificity | 1894 |
| | mitogen-activated protein | |
| | kinase | |
| P68104_C370 | EEF1A1 Elongation factor 1- | 1895 |
| | alpha 1 | |
| Q14204_C4216 | DYNC1H1 Cytoplasmic | 1896 |
| | dynein 1 heavy chain 1 | |
| P55060_C939 | CSE1L Exportin-2 | 1897 |
| Q8WYJ6_C293 | SEPT1 Septin-1 | 1898 |
| Q04760_C61 | GLO1 Lactoylglutathione | 1899 |
| | lyase | |
| P54105_C73 | CLNS1A Methylosome | 1900 |
| | subunit pICln | |
| Q99439_C274 | CNN2 Calponin-2 | 1901 |
| Q15054_C137 | POLD3 DNA polymerase delta | 1902 |
| | subunit 3 | |
| Q14232_C169 | EIF2B1 Translation initiation | 1903 |
| | factor eIF-2B subunit alpha | |
| Q8TB45_C284 | DEPTOR DEP domain- | 1904 |
| | containing mTOR-interacting | |
| | protein | |
| P18031_C92 | PTPN1 Tyrosine-protein | 1905 |
| | phosphatase non-receptor type | |
| | 1 | |
| O60343_C74 | TBC1D4 TBC1 domain family | 1906 |
| | member 4 | |
| Q9NQW6_C353 | ANLN Actin-binding protein | 1907 |
| | anillin | |
| Q86U90_C99 | YRDC YrdC domain- | 1908 |
| | containing protein, | |
| | mitochondrial | |
| Q9Y3D2_C45 | MSRB2 Methionine-R- | 1909 |
| | sulfoxide reductase B2, | |
| | mitochondrial | |
| Q9P258_C144 | RCC2 Protein RCC2 | 1910 |
| P56192_C441 | MARS Methionine--tRNA | 1911 |
| | ligase, cytoplasmic | |
| P31751_C311 | AKT2 RAC-beta | 1912 |
| | serine/threonine-protein kinase | |
| O00410_C915 | IPO5 Importin-5 | 1913 |
| Q53ET0_C515 | CRTC2 CREB-regulated | 1914 |
| | transcription coactivator 2 | |
| P29401_C417 | TKT Transketolase | 1915 |
| Q9UPN9_C461 | TRIM33 E3 ubiquitin-protein | 1916 |
| | ligase TRIM33 | |
| P16152_C227 | CBR1 Carbonyl reductase | 1917 |
| P49419_C478 | ALDH7A1 Alpha-aminoadipic | 1918 |
| | semialdehyde dehydrogenase | |
| Q9BX40_C310 | LSM14B Protein LSM14 | 1919 |
| | homolog B | |
| Q93009_C315 | USP7 Ubiquitin carboxyl- | 1920 |
| | terminal hydrolase 7 | |
| Q9P0L0_C60 | VAPA Vesicle-associated | 1921 |
| | membrane protein-associated | |
| | protein A | |
| Q9Y617_C291 | PSAT1 Phosphoserine | 1922 |
| | aminotransferase | |
| Q5U5X0_C97 | LYRM7 LYR motif-containing | 1923 |
| | protein 7 | |
| O75390_C101 | CS Citrate synthase, | 1924 |
| | mitochondrial | |
| P53602_C386 | MVD Diphosphomevalonate | 1925 |
| | decarboxylase | |
| P60953_C157 | CDC42 Cell division control | 1926 |
| | protein 42 homolog | |
| P09936_C47 | UCHL1 Ubiquitin carboxyl- | 1927 |
| | terminal hydrolase isozyme L1 | |
| P21333_C1018 | FLNA Filamin-A | 1928 |
| O00267_C740 | SUPT5H Transcription | 1929 |
| | elongation factor SPT5 | |
| P42166_C518 | TMPO Lamina-associated | 1930 |
| | polypeptide 2, isoform alpha | |
| P41091_C105 | EIF2S3 Eukaryotic translation | 1931 |
| | initiation factor 2 subunit | |
| Q92973_C297 | TNPO1 Transportin-1 | 1932 |
| Q15149_C3336 | PLEC Plectin | 1933 |
| P22314_C278 | UBA1 Ubiquitin-like modifier- | 1934 |
| | activating enzyme 1 | |
| P38117_C42 | ETFB Electron transfer | 1935 |
| | flavoprotein subunit beta | |
| P62316_C46 | SNRPD2 Small nuclear | 1936 |
| | ribonucleoprotein Sm D2 | |
| P48735_C154 | IDH2 Isocitrate dehydrogenase | 1937 |
| O00151_C45 | PDLIM1 PDZ and LIM | 1938 |
| | domain protein 1 | |
| Q8IUD2_C258 | ERC1 ELKS/Rab6- | 1939 |
| | interacting/CAST family | |
| | member 1 | |
| P55210_C186 | CASP7 Caspase-7 | 1940 |
| Q9BY77_C338 | POLDIP3 Polymerase delta- | 1941 |
| | interacting protein 3 | |
| Q13501_C131 | SQSTM1 Sequestosome-1 | 1942 |
| Q96ST2_C749 | IWS1 Protein IWS1 homolog | 1943 |
| P41250_C180 | GARS Glycine--tRNA ligase | 1944 |
| Q96EB6_C67 | SIRT1 NAD-dependent protein | 1945 |
| | deacetylase sirtuin-1 | |
| P23921_C492 | RRM1 Ribonucleoside- | 1946 |
| | diphosphate reductase large | |
| | subunit | |
| Q53H96_C235 | PYCRL Pyrroline-5- | 1947 |
| | carboxylate reductase 3 | |
| B9A064_C213 | IGLL5 Immunoglobulin | 1948 |
| | lambda-like polypeptide 5 | |
| P49588_C947 | AARS Alanine--tRNA ligase, | 1949 |
| | cytoplasmic | |
| P25398_C56 | RPS12 40S ribosomal protein | 1950 |
| | S12 | |
| P28066_C165 | PSMA5 Proteasome subunit | 1951 |
| | alpha type-5 | |
| P46937_C343 | YAP1 Yorkie homolog | 1952 |
| Q16836_C211 | HADH Hydroxyacyl- | 1953 |
| | coenzyme A dehydrogenase, | |
| | mitochondrial | |
| P30626_C57 | SRI Sorcin | 1954 |
| P49023_C108 | PXN Paxillin | 1955 |
| P35270_C159 | SPR Sepiapterin reductase | 1956 |
| P02545_C588 | LMNA Prelamin-A/C | 1957 |
| P08621_C39 | SNRNP70 U1 small nuclear | 1958 |
| | ribonucleoprotein 70 kDa | |
| Q14566_C91 | MCM6 DNA replication | 1959 |
| | licensing factor MCM6 | |
| Q14103_C226 | HNRNPD Heterogeneous | 1960 |
| | nuclear ribonucleoprotein D0 | |
| P26641_C194 | EEF1G Elongation factor 1- | 1961 |
| | gamma | |
| Q9UK41_C128 | VPS28 Vacuolar protein | 1962 |
| | sorting-associated protein 28 | |
| | homolog | |
| Q9BQ52_C441 | ELAC2 Zinc | 1963 |
| | phosphodiesterase ELAC | |
| | protein 2 | |
| P04632_C232 | CAPNS1 Calpain small | 1964 |
| | subunit 1 | |
| P09936_C90 | UCHL1 Ubiquitin carboxyl- | 1965 |
| | terminal hydrolase isozyme L1 | |
| P21333_C1912 | FLNA Filamin-A | 1966 |
| P30566_C340 | ADSL Adenylosuccinate lyase | 1967 |
| O95983_C215 | MBD3 Methyl-CpG-binding | 1968 |
| | domain protein 3 | |
| P40925_C251 | MDH1 Malate dehydrogenase, | 1969 |
| | cytoplasmic | |
| P78417_C90 | GSTO1 Glutathione S- | 1970 |
| | transferase omega-1 | |
| P17655_C82 | CAPN2 Calpain-2 catalytic | 1971 |
| | subunit | |
| O75688_C172 | PPM1B Protein phosphatase | 1972 |
| | 1B | |
| Q09666_C2806 | AHNAK Neuroblast | 1973 |
| | differentiation-associated | |
| | protein AHNA | |
| P62140_C126 | PPP1CB Serine/threonine- | 1974 |
| | protein phosphatase PP1-beta | |
| | cata | |
| P54687_C8 | BCAT1 Branched-chain- | 1975 |
| | amino-acid aminotransferase, | |
| | cytosol | |
| O60934_C487 | NBN Nibrin | 1976 |
| Q9NZT2_C443 | OGFR Opioid growth factor | 1977 |
| | receptor | |
| P52789_C834 | HK2 Hexokinase-2 | 1978 |
| P35579_C671 | MYH9 Myosin-9 | 1979 |
| Q9HAV7_C108 | GRPEL1 GrpE protein | 1980 |
| | homolog 1, mitochondrial | |
| O43175_C18 | PHGDH D-3- | 1981 |
| | phosphoglycerate | |
| | dehydrogenase | |
| O43175_C295 | PHGDH D-3- | 1982 |
| | phosphoglycerate | |
| | dehydrogenase | |
| P12004_C162 | PCNA Proliferating cell | 1983 |
| | nuclear antigen | |
| O75531_C85 | BANF1 Barrier-to- | 1984 |
| | autointegration factor | |
| P46940_C494 | IQGAP1 Ras GTPase- | 1985 |
| | activating-like protein | |
| | IQGAP1 | |
| P11586_C195 | MTHFD1 C-1-tetrahydrofolate | 1986 |
| | synthase, cytoplasmic | |
| Q7Z5L9_C65 | IRF2BP2 Interferon regulatory | 1987 |
| | factor 2-binding protein 2 | |
| Q9Y5K6_C595 | CD2AP CD2-associated | 1988 |
| | protein | |
| Q9Y5L0_C511 | TNPO3 Transportin-3 | 1989 |
| Q9NZN4_C138 | EHD2 EH domain-containing | 1990 |
| | protein 2 | |
| Q13813_C2233 | SPTAN1 Spectrin alpha chain, | 1991 |
| | non-erythrocytic 1 | |
| P62910_C91 | RPL32 60S ribosomal protein | 1992 |
| | L32 | |
| O76003_C229 | GLRX3 Glutaredoxin-3 | 1993 |
| P08559_C181 | PDHA1 Pyruvate | 1994 |
| | dehydrogenase E1 component | |
| | subunit alpha, | |
| P42126_C173 | ECI1 Enoyl-CoA delta | 1995 |
| | isomerase 1, mitochondrial | |
| P84103_C6 | SRSF3 Serine/arginine-rich | 1996 |
| | splicing factor 3 | |
| Q14566_C540 | MCM6 DNA replication | 1997 |
| | licensing factor MCM6 | |
| P21980_C290 | TGM2 Protein-glutamine | 1998 |
| | gamma-glutamyltransferase 2 | |
| O75391_C191 | SPAG7 Sperm-associated | 1999 |
| | antigen 7 | |
| P31943_C22 | HNRNPH1 Heterogeneous | 2000 |
| | nuclear ribonucleoprotein H | |
| P31943_C290 | HNRNPH1 Heterogeneous | 2001 |
| | nuclear ribonucleoprotein H | |
| O95347_C132 | SMC2 Structural maintenance | 2002 |
| | of chromosomes protein 2 | |
| O95983_C172 | MBD3 Methyl-CpG-binding | 2003 |
| | domain protein 3 | |
| P49321_C788 | NASP Nuclear autoantigenic | 2004 |
| | sperm protein | |
| P13489_C96 | RNH1 Ribonuclease inhibitor | 2005 |
| Q86V48_C969 | LUZP1 Leucine zipper protein | 2006 |
| | 1 | |
| Q14240_C135 | EIF4A2 Eukaryotic initiation | 2007 |
| | factor 4A-II | |
| P22307_C71 | SCP2 Non-specific lipid- | 2008 |
| | transfer protein | |
| Q9Y3B4_C83 | SF3B14 Pre-mRNA branch | 2009 |
| | site protein p14 | |
| Q8WUM4_C512 | PDCD6IP Programmed cell | 2010 |
| | death 6-interacting protein | |
| Q8IXH7_C293 | TH1L Negative elongation | 2011 |
| | factor C/D | |
| Q15003_C296 | NCAPH Condensin complex | 2012 |
| | subunit 2 | |
| Q9C0B1_C171 | FTO Alpha-ketoglutarate- | 2013 |
| | dependent dioxygenase FTO | |
| Q8WXI9_C308 | GATAD2B Transcriptional | 2014 |
| | repressor p66-beta | |
| P07814_C856 | EPRS Bifunctional | 2015 |
| | glutamate/proline--tRNA | |
| | ligase | |
| P22102_C134 | GART Trifunctional purine | 2016 |
| | biosynthetic protein adenosin | |
| Q13425_C374 | SNTB2 Beta-2-syntrophin | 2017 |
| Q04760_C139 | GLO1 Lactoylglutathione | 2018 |
| | lyase | |
| P25789_C163 | PSMA4 Proteasome subunit | 2019 |
| | alpha type-4 | |
| P07355_C262 | ANXA2 Annexin A2 | 2020 |
| P53597_C172 | SUCLG1 Succinyl-CoA ligase | 2021 |
| P26368_C429 | U2AF2 Splicing factor U2AF | 2022 |
| | 65 kDa subunit | |
| Q05086_C83 | UBE3A Ubiquitin-protein | 2023 |
| | ligase E3A | |
| O00170_C208 | AIP AH receptor-interacting | 2024 |
| | protein | |
| P31323_C116 | PRKAR2B cAMP-dependent | 2025 |
| | protein kinase type II-beta | |
| | regulat | |
| Q8WW33_C51 | GTSF1 Gametocyte-specific | 2026 |
| | factor 1 | |
| Q9Y5Y2_C196 | NUBP2 Cytosolic Fe—S cluster | 2027 |
| | assembly factor NUBP2 | |
| O95456_C169 | PSMG1 Proteasome assembly | 2028 |
| | chaperone 1 | |
| P13796_C618 | LCP1 Plastin-2 | 2029 |
| P23921_C779 | RRM1 Ribonucleoside- | 2030 |
| | diphosphate reductase large | |
| | subunit | |
| P31689_C149 | DNAJA1 DnaJ homolog | 2031 |
| | subfamily A member 1 | |
| Q9Y490_C1045 | TLN1 Talin-1 | 2032 |
| Q9UGI8_C196 | TES Testin | 2033 |
| P54136_C369 | RARS Arginine--tRNA ligase, | 2034 |
| | cytoplasmic | |
| P47756_C62 | CAPZB F-actin-capping | 2035 |
| | protein subunit beta | |
| P47897_C657 | QARS Glutamine--tRNA | 2036 |
| | ligase | |
| P56192_C12 | MARS Methionine--tRNA | 2037 |
| | ligase, cytoplasmic | |
| Q9Y570_C312 | PPME1 Protein phosphatase | 2038 |
| | methylesterase 1 | |
| Q7L4I2_C382 | RSRC2 Arginine/serine-rich | 2039 |
| | coiled-coil protein 2 | |
| Q13496_C53 | MTM1 Myotubularin | 2040 |
| O15460_C510 | P4HA2 Prolyl 4-hydroxylase | 2041 |
| | subunit alpha-2 | |
| P00558_C99 | PGK1 Phosphoglycerate | 2042 |
| | kinase 1 | |
| P05412_C99 | JUN Transcription factor AP-1 | 2043 |
| Q9H3R5_C35 | CENPH Centromere protein H | 2044 |
| Q02543_C16 | RPL18A 60S ribosomal | 2045 |
| | protein L18a | |
| Q06587_C69 | RING1 E3 ubiquitin-protein | 2046 |
| | ligase RING1 | |
| Q15365_C163 | PCBP1 Poly(rC)-binding | 2047 |
| | protein 1 | |
| O75369_C660 | FLNB Filamin-B | 2048 |
| O75369_C2537 | FLNB Filamin-B | 2049 |
| Q5RKV6_C117 | EXOSC6 Exosome complex | 2050 |
| | component MTR3 | |
| O15067_C606 | PFAS | 2051 |
| | Phosphoribosylformylglycinamidine | |
| | synthase | |
| Q9HB19_C191 | PLEKHA2 Pleckstrin | 2052 |
| | homology domain-containing | |
| | family A member 2 | |
| Q8WVV9_C84 | HNRPLL Heterogeneous | 2053 |
| | nuclear ribonucleoprotein L- | |
| | like | |
| O95400_C234 | CD2BP2 CD2 antigen | 2054 |
| | cytoplasmic tail-binding | |
| | protein 2 | |
| O94804_C947 | STK10 Serine/threonine- | 2055 |
| | protein kinase 10 | |
| Q5TBB1_C56 | RNASEH2B Ribonuclease H2 | 2056 |
| | subunit B | |
| Q96GW9_C425 | MARS2 Methionine--tRNA | 2057 |
| | ligase, mitochondrial | |
| P82912_C112 | MRPS11 28S ribosomal | 2058 |
| | protein S11, mitochondrial | |
| Q16643_C613 | DBN1 Drebrin | 2059 |
| Q9UPQ0_C577 | LIMCH1 LIM and calponin | 2060 |
| | homology domains-containing | |
| | prote | |
| P21333_C1453 | FLNA Filamin-A | 2061 |
| Q9UGV2_C166 | NDRG3 Protein NDRG3 | 2062 |
| P40926_C89 | MDH2 Malate dehydrogenase, | 2063 |
| | mitochondrial | |
| P40926_C93 | MDH2 Malate dehydrogenase, | 2064 |
| | mitochondrial | |
| Q14839_C1594 | CHD4 Chromodomain- | 2065 |
| | helicase-DNA-binding protein | |
| | 4 | |
| O95273_C300 | CCNDBP1 Cyclin-D1-binding | 2066 |
| | protein 1 | |
| A6NE09_C163 | RPSAP58 Protein RPSAP58 | 2067 |
| P62942_C23 | FKBP1A Peptidyl-prolyl cis- | 2068 |
| | trans isomerase FKBP1A | |
| Q04446_C221 | GBE1 1,4-alpha-glucan- | 2069 |
| | branching enzyme | |
| P16219_C289 | ACADS Short-chain specific | 2070 |
| | acyl-CoA dehydrogenase, | |
| | mitochondrial | |
| Q9Y3C6_C133 | PPIL1 Peptidyl-prolyl cis-trans | 2071 |
| | isomerase-like 1 | |
| P61970_C80 | NUTF2 Nuclear transport | 2072 |
| | factor 2 | |
| O14776_C535 | TCERG1 Transcription | 2073 |
| | elongation regulator 1 | |
| Q9BRP1_C278 | PDCD2L Programmed cell | 2074 |
| | death protein 2-like | |
| P13639_C567 | EEF2 Elongation factor 2 | 2075 |
| Q8WUX2_C113 | CHAC2 Cation transport | 2076 |
| | regulator-like protein 2 | |
| Q9H8W4_C219 | PLEKHF2 Pleckstrin | 2077 |
| | homology domain-containing | |
| | family F member 2 | |
| Q15021_C286 | NCAPD2 Condensin complex | 2078 |
| | subunit 1 | |
| O95394_C93 | PGM3 | 2079 |
| | Phosphoacetylglucosamine | |
| | mutase | |
| Q9NP61_C312 | ARFGAP3 ADP-ribosylation | 2080 |
| | factor GTPase-activating | |
| | protein | |
| Q86TG7_C119 | PEG10 Retrotransposon- | 2081 |
| | derived protein PEG10 | |
| Q7L0Y3_C78 | TRMT10C Mitochondrial | 2082 |
| | ribonuclease P protein 1 | |
| P35579_C694 | MYH9 Myosin-9 | 2083 |
| Q7Z7A4_C570 | PXK PX domain-containing | 2084 |
| | protein kinase-like protein | |
| P05091_C386 | ALDH2 Aldehyde | 2085 |
| | dehydrogenase, mitochondrial | |
| O15231_C615 | ZNF185 Zinc finger protein | 2086 |
| | 185 | |
| Q9P2J5_C573 | LARS Leucine--tRNA ligase, | 2087 |
| | cytoplasmic | |
| P41250_C525 | GARS Glycine--tRNA ligase | 2088 |
| Q9NR33_C84 | POLE4 DNA polymerase | 2089 |
| | epsilon subunit 4 | |
| Q9NQW6_C210 | ANLN Actin-binding protein | 2090 |
| | anillin | |
| Q9NQW6_C1117 | ANLN Actin-binding protein | 2091 |
| | anillin | |
| Q9HCC0_C267 | MCCC2 Methylcrotonoyl-CoA | 2092 |
| | carboxylase beta chain, mitoch | |
| P55884_C420 | EIF3B Eukaryotic translation | 2093 |
| | initiation factor 3 subunit | |
| P20290_C22 | BTF3 Transcription factor | 2094 |
| | BTF3 | |
| P49368_C398 | CCT3 T-complex protein 1 | 2095 |
| | subunit gamma | |
| O75600_C106 | GCAT 2-amino-3-ketobutyrate | 2096 |
| | coenzyme A ligase, | |
| | mitochondrial | |
| Q6PKG0_C864 | LARP1 La-related protein 1 | 2097 |
| Q5H9R7_C467 | PPP6R3 Serine/threonine- | 2098 |
| | protein phosphatase 6 | |
| | regulatory | |
| Q9H4A4_C311 | RNPEP Aminopeptidase B | 2099 |
| Q9BUF5_C12 | TUBB6 Tubulin beta-6 chain | 2100 |
| P52272_C676 | HNRNPM Heterogeneous | 2101 |
| | nuclear ribonucleoprotein M | |
| Q8TB03_C300 | CXorf38 Uncharacterized | 2102 |
| | protein CXorf38 | |
| Q9H7D7_C656 | WDR26 WD repeat-containing | 2103 |
| | protein 26 | |
| P50395_C317 | GDI2 Rab GDP dissociation | 2104 |
| | inhibitor beta | |
| P25205_C263 | MCM3 DNA replication | 2105 |
| | licensing factor MCM3 | |
| Q8TD19_C878 | NEK9 Serine/threonine-protein | 2106 |
| | kinase Nek9 | |
| P31947_C96 | SFN 14-3-3 protein sigma | 2107 |
| P49321_C568 | NASP Nuclear autoantigenic | 2108 |
| | sperm protein | |
| Q7L2J0_C54 | MEPCE 7SK snRNA | 2109 |
| | methylphosphate capping | |
| | enzyme | |
| Q96BN8_C347 | FAM105B Protein FAM105B | 2110 |
| Q12888_C1159 | TP53BP1 Tumor suppressor | 2111 |
| | p53-binding protein 1 | |
| P29034_C22 | S100A2 Protein S100-A2 | 2112 |
| P61978_C205 | HNRNPK Heterogeneous | 2113 |
| | nuclear ribonucleoprotein K | |
| P78527_C3837 | PRKDC DNA-dependent | 2114 |
| | protein kinase catalytic subunit | |
| Q7LG56_C279 | RRM2B Ribonucleoside- | 2115 |
| | diphosphate reductase subunit | |
| | M2 B | |
| P12814_C180 | ACTN1 Alpha-actinin-1 | 2116 |
| Q9ULV4_C343 | CORO1C Coronin-1C | 2117 |
| P22234_C185 | PAICS Multifunctional protein | 2118 |
| | ADE2 | |
| P22234_C288 | PAICS Multifunctional protein | 2119 |
| | ADE2 | |
| P30837_C386 | ALDH1B1 Aldehyde | 2120 |
| | dehydrogenase X, | |
| | mitochondrial | |
| P25098_C120 | ADRBK1 Beta-adrenergic | 2121 |
| | receptor kinase 1 | |
| P35998_C180 | PSMC2 26S protease | 2122 |
| | regulatory subunit 7 | |
| P08243_C255 | ASNS Asparagine synthetase | 2123 |
| O95819_C202 | MAP4K4 Mitogen-activated | 2124 |
| | protein kinase kinase kinase | |
| | kin | |
| Q13557_C273 | CAMK2D | 2125 |
| | Calcium/calmodulin-dependent | |
| | protein kinase type I | |
| P50213_C127 | IDH3A Isocitrate | 2126 |
| | dehydrogenase | |
| O95336_C237 | PGLS 6- | 2127 |
| | phosphogluconolactonase | |
| Q13155_C143 | AIMP2 Aminoacyl tRNA | 2128 |
| | synthase complex-interacting | |
| | multifunctional protein 2 | |
| Q14204_C3940 | DYNC1H1 Cytoplasmic | 2129 |
| | dynein 1 heavy chain 1 | |
| P30154_C306 | PPP2R1B Serine/threonine- | 2130 |
| | protein phosphatase 2A 65 kDa | |
| | regulatory subunit A beta | |
| | isoform | |
| P61758_C113 | VBP1 Prefoldin subunit 3 | 2131 |
| P48739_C13 | PITPNB Phosphatidylinositol | 2132 |
| | transfer protein beta isoform | |
| P08134_C159 | RHOC Rho-related GTP- | 2133 |
| | binding protein RhoC | |
| P15121_C81 | AKR1B1 Aldose reductase | 2134 |
| P86790_C358 | CCZ1B Vacuolar fusion | 2135 |
| | protein CCZ1 homolog B | |
| P42704_C863 | LRPPRC Leucine-rich PPR | 2136 |
| | motif-containing protein, | |
| | mitochondrial | |
| P33316_C166 | DUT Deoxyuridine 5- | 2137 |
| | triphosphate | |
| | nucleotidohydrolase, | |
| Q92597_C289 | NDRG1 Protein NDRG1 | 2138 |
| P35236_C62 | PTPN7 Tyrosine-protein | 2139 |
| | phosphatase non-receptor type | |
| | 7 | |
| P17987_C296 | TCP1 T-complex protein 1 | 2140 |
| | subunit alpha | |
| Q6PI48_C590 | DARS2 Aspartate--tRNA | 2141 |
| | ligase, mitochondrial | |
| P63244_C249 | GNB2L1 Guanine nucleotide- | 2142 |
| | binding protein subunit beta-2- | |
| | like 1 | |
| Q12874_C437 | SF3A3 Splicing factor 3A | 2143 |
| | subunit 3 | |
| Q9Y6W5_C27 | WASF2 Wiskott-Aldrich | 2144 |
| | syndrome protein family | |
| | member 2 | |
| P04075_C290 | ALDOA Fructose- | 2145 |
| | bisphosphate aldolase A | |
| Q8WW33_C76 | GTSF1 Gametocyte-specific | 2146 |
| | factor 1 | |
| P57081_C137 | WDR4 tRNA (guanine-N(7)-)- | 2147 |
| | methyltransferase subunit | |
| | WDR | |
| O60343_C1277 | TBC1D4 TBC1 domain family | 2148 |
| | member 4 | |
| P30084_C111 | ECHS1 Enoyl-CoA hydratase, | 2149 |
| | mitochondrial | |
| P12268_C173 | IMPDH2 Inosine-5- | 2150 |
| | monophosphate dehydrogenase | |
| | 2 | |
| O43290_C674 | SART1 U4/U6.U5 tri-snRNP- | 2151 |
| | associated protein 1 | |
| Q9P258_C280 | RCC2 Protein RCC2 | 2152 |
| P15153_C6 | RAC2 Ras-related C3 | 2153 |
| | botulinum toxin substrate 2 | |
| O60361_C94 | NME2P1 Putative nucleoside | 2154 |
| | diphosphate kinase | |
| O75600_C219 | GCAT 2-amino-3-ketobutyrate | 2155 |
| | coenzyme A ligase, | |
| | mitochondrial | |
| O60568_C494 | PLOD3 Procollagen-lysine,2- | 2156 |
| | oxoglutarate 5-dioxygenase 3 | |
| Q9H0R6_C512 | QRSL1 Glutamyl-tRNA(Gln) | 2157 |
| | amidotransferase subunit A, | |
| | mitochondrial | |
| Q7RTV0_C11 | PHF5A PHD finger-like | 2158 |
| | domain-containing protein 5A | |
| Q96I99_C255 | SUCLG2 Succinyl-CoA ligase | 2159 |
| A0AVT1_C770 | UBA6 Ubiquitin-like modifier- | 2160 |
| | activating enzyme 6 | |
| P08047_C755 | SP1 Transcription factor Sp1 | 2161 |
| P26641_C166 | EEF1G Elongation factor 1- | 2162 |
| | gamma | |
| Q16270_C131 | IGFBP7 Insulin-like growth | 2163 |
| | factor-binding protein 7 | |
| Q9BQ52_C51 | ELAC2 Zinc | 2164 |
| | phosphodiesterase ELAC | |
| | protein 2 | |
| Q6YN16_C11 | HSDL2 Hydroxysteroid | 2165 |
| | dehydrogenase-like protein 2 | |
| Q9BQP7_C79 | C20orf72 Uncharacterized | 2166 |
| | protein C20orf72 | |
| Q7Z6Z7_C2865 | HUWE1 E3 ubiquitin-protein | 2167 |
| | ligase HUWE1 | |
| Q7Z6Z7_C3259 | HUWE1 E3 ubiquitin-protein | 2168 |
| | ligase HUWE1 | |
| Q7Z6Z7_C3658 | HUWE1 E3 ubiquitin-protein | 2169 |
| | ligase HUWE1 | |
| Q14914_C239 | PTGR1 Prostaglandin | 2170 |
| | reductase 1 | |
| O00268_C1022 | TAF4 Transcription initiation | 2171 |
| | factor TFIID subunit 4 | |
| O95340_C155 | PAPSS2 Bifunctional 3- | 2172 |
| | phosphoadenosine 5- | |
| | phosphosulfate | |
| O95295_C66 | SNAPIN SNARE-associated | 2173 |
| | protein Snapin | |
| P43490_C287 | NAMPT Nicotinamide | 2174 |
| | phosphoribosyltransferase | |
| P49327_C135 | FASN Fatty acid synthase | 2175 |
| Q9Y383_C59 | LUC7L2 Putative RNA- | 2176 |
| | binding protein Luc7-like 2 | |
| Q9NS86_C49 | LANCL2 LanC-like protein 2 | 2177 |
| Q15149_C317 | PLEC Plectin | 2178 |
| O60825_C430 | PFKFB2 6-phosphofructo-2- | 2179 |
| | kinase/fructose-2,6- | |
| | bisphosphatase 2 | |
| Q5JS54_C55 | PSMG4 Proteasome assembly | 2180 |
| | chaperone 4 | |
| P52566_C76 | ARHGDIB Rho GDP- | 2181 |
| | dissociation inhibitor 2 | |
| P07203_C156 | GPX1 Glutathione peroxidase | 2182 |
| | 1 | |
| Q9UL25_C29 | RAB21 Ras-related protein | 2183 |
| | Rab-21 | |
| P49841_C14 | GSK3B Glycogen synthase | 2184 |
| | kinase-3 beta | |
| P17655_C39 | CAPN2 Calpain-2 catalytic | 2185 |
| | subunit | |
| Q14315_C2679 | FLNC Filamin-C | 2186 |
| P32969_C74 | RPL9P9 60S ribosomal protein | 2187 |
| | L9 | |
| Q96JH7_C1178 | VCPIP1 Deubiquitinating | 2188 |
| | protein VCIP135 | |
| Q9NP61_C241 | ARFGAP3 ADP-ribosylation | 2189 |
| | factor GTPase-activating | |
| | protein | |
| Q9Y265_C141 | RUVBL1 RuvB-like 1 | 2190 |
| P52789_C158 | HK2 Hexokinase-2 | 2191 |
| P35579_C172 | MYH9 Myosin-9 | 2192 |
| P12955_C482 | PEPD Xaa-Pro dipeptidase | 2193 |
| Q86UX7_C235 | FERMT3 Fermitin family | 2194 |
| | homolog 3 | |
| Q15003_C239 | NCAPH Condensin complex | 2195 |
| | subunit 2 | |
| P07814_C1377 | EPRS Bifunctional | 2196 |
| | glutamate/proline--tRNA | |
| | ligase | |
| P11586_C143 | MTHFD1 C-1-tetrahydrofolate | 2197 |
| | synthase, cytoplasmic | |
| P62312_C36 | LSM6 U6 snRNA-associated | 2198 |
| | Sm-like protein LSm6 | |
| P55209_C132 | NAP1L1 Nucleosome | 2199 |
| | assembly protein 1-like 1 | |
| O75815_C699 | BCAR3 Breast cancer anti- | 2200 |
| | estrogen resistance protein 3 | |
| P24534_C191 | EEF1B2 Elongation factor 1- | 2201 |
| | beta | |
| P15121_C200 | AKR1B1 Aldose reductase | 2202 |
| Q9GZU8_C187 | FAM192A Protein FAM192A | 2203 |
| P25789_C34 | PSMA4 Proteasome subunit | 2204 |
| | alpha type-4 | |
| P25789_C74 | PSMA4 Proteasome subunit | 2205 |
| | alpha type-4 | |
| P07355_C133 | ANXA2 Annexin A2 | 2206 |
| Q15393_C410 | SF3B3 Splicing factor 3B | 2207 |
| | subunit 3 | |
| P63244_C240 | GNB2L1 Guanine nucleotide- | 2208 |
| | binding protein subunit beta-2- | |
| | like 1 | |
| P61247_C111 | RPS3A 40S ribosomal protein | 2209 |
| | S3a | |
| P53582_C40 | METAP1 Methionine | 2210 |
| | aminopeptidase 1 | |
| P23921_C790 | RRM1 Ribonucleoside- | 2211 |
| | diphosphate reductase large | |
| | subunit R | |
| Q9BT78_C378 | COPS4 COP9 signalosome | 2212 |
| | complex subunit 4 | |
| Q7KZ85_C336 | SUPT6H Transcription | 2213 |
| | elongation factor SPT6 | |
| P23381_C274 | WARS Tryptophan--tRNA | 2214 |
| | ligase, cytoplasmic | |
| P36551_C239 | CPOX Coproporphyrinogen- | 2215 |
| | III oxidase, mitochondrial | |
| Q7KZF4_C31 | SND1 Staphylococcal nuclease | 2216 |
| | domain-containing protein | |
| Q14139_C1002 | UBE4A Ubiquitin conjugation | 2217 |
| | factor E4 A | |
| Q8NCF5_C232 | NFATC2IP NFATC2- | 2218 |
| | interacting protein | |
| O75934_C106 | BCAS2 Pre-mRNA-splicing | 2219 |
| | factor SPF27 | |
| Q96IF1_C158 | AJUBA LIM domain- | 2220 |
| | containing protein ajuba | |
| Q9NZL4_C22 | HSPBP1 Hsp70-binding | 2221 |
| | protein 1 | |
| Q9NZL9_C58 | MAT2B Methionine | 2222 |
| | adenosyltransferase 2 subunit | |
| | beta | |
| Q5TDH0_C361 | DDI2 Protein DDI1 homolog 2 | 2223 |
| Q13126_C131 | MTAP S-methyl-5- | 2224 |
| | thioadenosine phosphorylase | |
| O75369_C706 | FLNB Filamin-B | 2225 |
| P21980_C269 | TGM2 Protein-glutamine | 2226 |
| | gamma-glutamyltransferase 2 | |
| Q16270_C113 | IGFBP7 Insulin-like growth | 2227 |
| | factor-binding protein 7 | |
| H7BZ11_C88 | Uncharacterized protein | 2228 |
| Q96FZ2_C131 | C3orf37 UPF0361 protein | 2229 |
| | C3orf37 | |
| Q6YN16_C71 | HSDL2 Hydroxysteroid | 2230 |
| | dehydrogenase-like protein 2 | |
| Q9UBL3_C581 | ASH2L Set1/Ash2 histone | 2231 |
| | methyltransferase complex | |
| | subunit | |
| Q15370_C60 | TCEB2 Transcription | 2232 |
| | elongation factor B | |
| | polypeptide 2 | |
| O43252_C360 | PAPSS1 Bifunctional 3- | 2233 |
| | phosphoadenosine 5- | |
| | phosphosulfete | |
| P62633_C171 | CNBP Cellular nucleic acid- | 2234 |
| | binding protein | |
| P63151_C398 | PPP2R2A Serine/threonine- | 2235 |
| | protein phosphatase 2A 55 kDa | |
| | regulatory subunit B alpha | |
| | isoform | |
| Q16881_C209 | TXNRD1 Thioredoxin | 2236 |
| | reductase 1, cytoplasmic | |
| O95294_C761 | RASAL1 RasGAP-activating- | 2237 |
| | like protein 1 | |
| Q9UQ35_C872 | SRRM2 Serine/arginine | 2238 |
| | repetitive matrix protein 2 | |
| P78371_C535 | CCT2 T-complex protein 1 | 2239 |
| | subunit beta | |
| P54577_C250 | YARS Tyrosine--tRNA ligase, | 2240 |
| | cytoplasmic | |
| Q8TD30_C477 | GPT2 Alanine | 2241 |
| | aminotransferase 2 | |
| Q15149_C3299 | PLEC Plectin | 2242 |
| O14744_C278 | PRMT5 Protein arginine N- | 2243 |
| | methyltransferase 5 | |
| Q7L1Q6_C96 | BZW1 Basic leucine zipper | 2244 |
| | and W2 domain-containing | |
| | prot | |
| P04181_C150 | OAT Ornithine | 2245 |
| | aminotransferase, | |
| | mitochondrial | |
| P04181_C330 | OAT Ornithine | 2246 |
| | aminotransferase, | |
| | mitochondrial | |
| Q9NVT9_C69 | ARMC1 Armadillo repeat- | 2247 |
| | containing protein 1 | |
| O60888_C96 | CUTA Protein CutA | 2248 |
| Q6P2E9_C976 | EDC4 Enhancer of mRNA- | 2249 |
| | decapping protein 4 | |
| P20810_C408 | CAST Calpastatin | 2250 |
| Q5T6F2_C208 | UBAP2 Ubiquitin-associated | 2251 |
| | protein 2 | |
| Q9BQ61_C165 | C19orf43 Uncharacterized | 2252 |
| | protein C19orf43 | |
| P54687_C12 | BCAT1 Branched-chain- | 2253 |
| | amino-acid aminotransferase, | |
| | cytosolic | |
| P54687_C335 | BCAT1 Branched-chain- | 2254 |
| | amino-acid aminotransferase, | |
| | cytosolic | |
| Q96I15_C22 | SCLY Selenocysteine lyase | 2255 |
| P45974_C335 | USP5 Ubiquitin carboxyl- | 2256 |
| | terminal hydrolase 5 | |
| O14497_C336 | ARID1A AT-rich interactive | 2257 |
| | domain-containing protein 1A | |
| O43776_C438 | NARS Asparagine--tRNA | 2258 |
| | ligase, cytoplasmic | |
| P12955_C467 | PEPD Xaa-Pro dipeptidase | 2259 |
| Q9Y678_C97 | COPG1 Coatomer subunit | 2260 |
| | gamma-1 | |
| Q9Y678_C169 | COPG1 Coatomer subunit | 2261 |
| | gamma-1 | |
| P55786_C339 | NPEPPS Puromycin-sensitive | 2262 |
| | aminopeptidase | |
| Q9Y520_C223 | PRRC2C Protein PRRC2C | 2263 |
| P52306_C29 | RAP1GDS1 Rap1 GTPase- | 2264 |
| | GDP dissociation stimulator 1 | |
| Q6GMV2_C194 | SMYD5 SET and MYND | 2265 |
| | domain-containing protein 5 | |
| Q16763_C95 | UBE2S Ubiquitin-conjugating | 2266 |
| | enzyme E2 S | |
| Q7L014_C590 | DDX46 Probable ATP- | 2267 |
| | dependent RNA helicase | |
| | DDX46 | |
| Q8NFX7_C144 | STXBP6 Syntaxin-binding | 2268 |
| | protein 6 | |
| P56537_C11 | EIF6 Eukaryotic translation | 2269 |
| | initiation factor 6 | |
| Q9NRL3_C17 | STRN4 Striatin-4 | 2270 |
| P41252_C185 | IARS Isoleucine--tRNA ligase, | 2271 |
| | cytoplasmic | |
| O60343_C45 | TBC1D4 TBC1 domain family | 2272 |
| | member 4 | |
| P30086_C133 | PEBP1 | 2273 |
| | Phosphatidylethanolamine- | |
| | binding protein 1 | |
| Q9NQW7_C308 | XPNPEP1 Xaa-Pro | 2274 |
| | aminopeptidase 1 | |
| O00299_C89 | CLIC1 Chloride intracellular | 2275 |
| | channel protein 1 | |
| Q9Y4B6_C784 | VPRBP Protein VPRBP | 2276 |
| Q66PJ3_C349 | ARL6IP4 ADP-ribosylation | 2277 |
| | factor-like protein 6-interacting | |
| P00367_C327 | GLUD1 Glutamate | 2278 |
| | dehydrogenase 1, | |
| | mitochondrial | |
| Q14C86_C568 | GAPVD1 GTPase-activating | 2279 |
| | protein and VPS9 domain- | |
| | containing protein 1 | |
| P09382_C89 | LGALS1 Galectin-1 | 2280 |
| O00244_C41 | ATOX1 Copper transport | 2281 |
| | protein ATOX1 | |
| P16885_C624 | PLCG2 1-phosphatidylinositol | 2282 |
| | 4,5-bisphosphate | |
| | phosphodiesterase | |
| Q92835_C138 | INPP5D Phosphatidylinositol | 2283 |
| | 3,4,5-trisphosphate 5- | |
| | phosphatase 1 | |
| J3QR44_C430 | CDK11B Cyclin-dependent | 2284 |
| | kinase 11B | |
| Q9P289_C352 | MST4 Serine/threonine-protein | 2285 |
| | kinase MST4 | |
| Q92688_C27 | ANP32B Acidic leucine-rich | 2286 |
| | nuclear phosphoprotein 32 | |
| | family member B | |
| Q96GX9_C97 | APIP Probable | 2287 |
| | methylthioribulose-1- | |
| | phosphate dehydratase | |
| Q15004_C54 | KIAA0101 PCNA-associated | 2288 |
| | factor | |
| O75083_C325 | WDR1 WD repeat-containing | 2289 |
| | protein 1 | |
| O43252_C207 | PAPSS1 Bifunctional 3- | 2290 |
| | phosphoadenosine 5- | |
| | phosphosulfate | |
| P62633_C161 | CNBP Cellular nucleic acid- | 2291 |
| | binding protein | |
| Q7Z6Z7_C2832 | HUWE1 E3 ubiquitin-protein | 2292 |
| | ligase HUWE1 | |
| Q8NCW5_C91 | APOA1BP NAD(P)H-hydrate | 2293 |
| | epimerase | |
| P31949_C13 | S100A11 Protein S100-A11 | 2294 |
| P07900_C572 | HSP90AA1 Heat shock protein | 2295 |
| | HSP 90-alpha | |
| Q86UA6_C122 | RPAIN RPA-interacting | 2296 |
| | protein | |
| Q8N6M0_C172 | OTUD6B OTU domain- | 2297 |
| | containing protein 6B | |
| Q13153_C411 | PAK1 Serine/threonine-protein | 2298 |
| | kinase PAK 1 | |
| O60232_C53 | SSSCA1 Sjoegren | 2299 |
| | syndrome/scleroderma | |
| | autoantigen 1 | |
| Q9NQY0_C72 | BIN3 Bridging integrator 3 | 2300 |
| O60942_C419 | RNGTT mRNA-capping | 2301 |
| | enzyme | |
| P13804_C155 | ETFA Electron transfer | 2302 |
| | flavoprotein subunit alpha, | |
| | mitochondrial | |
| Q96QR8_C17 | PURB Transcriptional | 2303 |
| | activator protein Pur-beta | |
| O60711_C199 | LPXN Leupaxin | 2304 |
| Q00013_C242 | MPP1 55 kDa erythrocyte | 2305 |
| | membrane protein | |
| P52597_C290 | HNRNPF Heterogeneous | 2306 |
| | nuclear ribonucleoprotein F | |
| P09211_C102 | GSTP1 Glutathione S- | 2307 |
| | transferase P | |
| Q15149_C950 | PLEC Plectin | 2308 |
| P62195_C209 | PSMC5 26S protease | 2309 |
| | regulatory subunit 8 | |
| Q9Y2Q3_C176 | GSTK1 Glutathione S- | 2310 |
| | transferase kappa 1 | |
| O15164_C629 | TRIM24 Transcription | 2311 |
| | intermediary factor 1-alpha | |
| P22314_C234 | UBA1 Ubiquitin-like modifier- | 2312 |
| | activating enzyme 1 | |
| Q96HE7_C94 | ERO1L ERO1-like protein | 2313 |
| | alpha | |
| P07203_C78 | GPX1 Glutathione peroxidase | 2314 |
| | 1 | |
| P21964_C238 | COMT Catechol O- | 2315 |
| | methyltransferase | |
| O76071_C72 | CIAO1 Probable cytosolic | 2316 |
| | iron-sulfur protein assembly | |
| | protein CIAO1 | |
| P04083_C324 | ANXA1 Annexin A1 | 2317 |
| Q14315_C1109 | FLNC Filamin-C | 2318 |
| Q13526_C57 | PIN1 Peptidyl-prolyl cis-trans | 2319 |
| | isomerase NIMA-interacting 1 | |
| Q9Y3B2_C170 | EXOSC1 Exosome complex | 2320 |
| | component CSL4 | |
| P54687_C140 | BCAT1 Branched-chain- | 2321 |
| | amino-acid aminotransferase, | |
| | cytosolic | |
| Q92945_C379 | KHSRP Far upstream element- | 2322 |
| | binding protein 2 | |
| Q13148_C198 | TARDBP TAR DNA-binding | 2323 |
| | protein 43 | |
| Q9Y3C4_C167 | TPRKB TP53RK-binding | 2324 |
| | protein | |
| O43175_C281 | PHGDH D-3- | 2325 |
| | phosphoglycerate | |
| | dehydrogenase | |
| Q16698_C285 | DECR1 2,4-dienoyl-CoA | 2326 |
| | reductase, mitochondrial | |
| P49773_C38 | HINT1 Histidine triad | 2327 |
| | nucleotide-binding protein 1 | |
| P12004_C27 | PCNA Proliferating cell | 2328 |
| | nuclear antigen | |
| P51553_C81 | IDH3G Isocitrate | 2329 |
| | dehydrogenase | |
| Q14192_C214 | FHL2 Four and a half LIM | 2330 |
| | domains protein 2 | |
| P07814_C381 | EPRS Bifunctional | 2331 |
| | glutamate/proline--tRNA | |
| | ligase | |
| Q8WWY3_C247 | PRPF31 U4/U6 small nuclear | 2332 |
| | ribonucleoprotein Prp31 | |
| Q13085_C813 | ACACA Acetyl-CoA | 2333 |
| | carboxylase 1 | |
| O43765_C38 | SGTA Small glutamine-rich | 2334 |
| | tetratricopeptide repeat-cont | |
| Q13185_C160 | CBX3 Chromobox protein | 2335 |
| | homolog 3 | |
| Q9UBR2_C164 | CTSZ Cathepsin Z | 2336 |
| P54886_C612 | ALDH18A1 Delta-1-pyrroline- | 2337 |
| | 5-carboxylate synthase | |
| Q9H9E3_C494 | COG4 Conserved oligomeric | 2338 |
| | Golgi complex subunit 4 | |
| P19623_C209 | SRM Spermidine synthase | 2339 |
| P61247_C201 | RPS3A 40S ribosomal protein | 2340 |
| | S3a | |
| P15311_C284 | EZR Ezrin | 2341 |
| P53004_C204 | BLVRA Biliverdin reductase | 2342 |
| | A | |
| Q969E8_C114 | TSR2 Pre-rRNA-processing | 2343 |
| | protein TSR2 homolog | |
| P41252_C350 | IARS Isoleucine--tRNA ligase, | 2344 |
| | cytoplasmic | |
| O60343_C316 | TBC1D4 TBC1 domain family | 2345 |
| | member 4 | |
| Q96JB2_C349 | COG3 Conserved oligomeric | 2346 |
| | Golgi complex subunit 3 | |
| Q9Y490_C1978 | TLN1 Talin-1 | 2347 |
| P23381_C62 | WARS Tryptophan--tRNA | 2348 |
| | ligase, cytoplasmic | |
| P27708_C280 | CAD CAD protein | 2349 |
| Q9Y3Z3_C80 | SAMHD1 SAM domain and | 2350 |
| | HD domain-containing protein | |
| | 1 | |
| Q53H96_C49 | PYCRL Pyrroline-5- | 2351 |
| | carboxylate reductase 3 | |
| Q9HCC0_C431 | MCCC2 Methylcrotonoyl-CoA | 2352 |
| | carboxylase beta chain, | |
| | mitochondrial | |
| P47897_C358 | QARS Glutamine--tRNA | 2353 |
| | ligase | |
| P55084_C435 | HADHB Trifunctional enzyme | 2354 |
| | subunit beta, mitochondrial | |
| P30405_C157 | PPIF Peptidyl-prolyl cis-trans | 2355 |
| | isomerase F, mitochondrial | |
| P08567_C160 | PLEK Pleckstrin | 2356 |
| A6NHR9_C84 | SMCHD1 Structural | 2357 |
| | maintenance of chromosomes | |
| | flexible hinge domain | |
| | containing 1 | |
| Q9Y2X3_C439 | NOP58 Nucleolar protein 58 | 2358 |
| O00410_C420 | IPO5 Importin-5 | 2359 |
| P09382_C61 | LGALS1 Galectin-1 | 2360 |
| O75150_C950 | RNF40 E3 ubiquitin-protein | 2361 |
| | ligase BRE1B | |
| P11021_C420 | HSPA5 78 kDa glucose- | 2362 |
| | regulated protein | |
| P29401_C133 | TKT Transketolase | 2363 |
| Q92598_C658 | HSPH1 Heat shock protein 105 | 2364 |
| | kDa | |
| O43795_C129 | MYO1B Unconventional | 2365 |
| | myosin-Ib | |
| O75369_C1326 | FLNB Filamin-B | 2366 |
| Q70E73_C94 | RAPH1 Ras-associated and | 2367 |
| | pleckstrin homology domains- | |
| | con | |
| Q0PNE2_C218 | ELP6 Elongator complex | 2368 |
| | protein 6 | |
| Q12996_C628 | CSTF3 Cleavage stimulation | 2369 |
| | factor subunit 3 | |
| P09543_C49 | CNP 2,3-cyclic-nucleotide 3- | 2370 |
| | phosphodiesterase | |
| Q8WVV9_C405 | HNRPLL Heterogeneous | 2371 |
| | nuclear ribonucleoprotein L- | |
| | like | |
| Q8N4X5_C467 | AFAP1L2 Actin filament- | 2372 |
| | associated protein 1-like 2 | |
| Q8IUI8_C313 | CRLF3 Cytokine receptor-like | 2373 |
| | factor 3 | |
| Q9BPX3_C843 | NCAPG Condensin complex | 2374 |
| | subunit 3 | |
| P30566_C27 | ADSL Adenylosuccinate lyase | 2375 |
| O00469_C494 | PLOD2 Procollagen-lysine,2- | 2376 |
| | oxoglutarate 5-dioxygenase 2 | |
| Q92616_C55 | GCN1L1 Translational | 2377 |
| | activator GCN1 | |
| P49327_C212 | FASN Fatty acid synthase | 2378 |
| P42166_C330 | TMPO Lamina-associated | 2379 |
| | polypeptide 2, isoform alpha | |
| P55769_C73 | NHP2L1 NHP2-like protein 1 | 2380 |
| Q9UQ35_C2116 | SRRM2 Serine/arginine | 2381 |
| | repetitive matrix protein 2 | |
| P01591_C91 | IGJ Immunoglobulin J chain | 2382 |
| P61970_C38 | NUTF2 Nuclear transport | 2383 |
| | factor 2 | |
| O94953_C547 | KDM4B Lysine-specific | 2384 |
| | demethylase 4B | |
| Q15149_C730 | PLEC Plectin | 2385 |
| Q9ULW0_C301 | TPX2 Targeting protein for | 2386 |
| | Xklp2 | |
| Q9UNF1_C516 | MAGED2 Melanoma- | 2387 |
| | associated antigen D2 | |
| P51808_C8 | DYNLT3 Dynein light chain | 2388 |
| | Tctex-type 3 | |
| Q09666_C5502 | AHNAK Neuroblast | 2389 |
| | differentiation-associated | |
| | protein AHNA | |
| P27348_C25 | YWHAQ 14-3-3 protein theta | 2390 |
| Q8WUM0_C811 | NUP133 Nuclear pore | 2391 |
| | complex protein Nup133 | |
| P52789_C628 | HK2 Hexokinase-2 | 2392 |
| O60716_C618 | CTNND1 Catenin delta-1 | 2393 |
| P26599_C251 | PTBP1 Polypyrimidine tract- | 2394 |
| | binding protein 1 | |
| P23528_C147 | CFL1 Cofilin-1 | 2395 |
| Q14694_C94 | USP10 Ubiquitin carboxyl- | 2396 |
| | terminal hydrolase 10 | |
| P36507_C384 | MAP2K2 Dual specificity | 2397 |
| | mitogen-activated protein | |
| | kinase | |
| Q9UJX3_C259 | ANAPC7 Anaphase-promoting | 2398 |
| | complex subunit 7 | |
| Q9BV20_C168 | MRI1 Methylthioribose-1- | 2399 |
| | phosphate isomerase | |
| Q9Y696_C189 | CLIC4 Chloride intracellular | 2400 |
| | channel protein 4 | |
| Q6ZMK1_C342 | CYHR1 Cysteine and | 2401 |
| | histidine-rich protein 1 | |
| P45954_C139 | ACADSB Short/branched | 2402 |
| | chain specific acyl-CoA | |
| | dehydrogena | |
| P15121_C187 | AKR1B1 Aldose reductase | 2403 |
| Q9NR50_C64 | EIF2B3 Translation initiation | 2404 |
| | factor eIF-2B subunit gamma | |
| Q14980_C1907 | NUMA1 Nuclear mitotic | 2405 |
| | apparatus protein 1 | |
| O43707_C793 | ACTN4 Alpha-actinin-4 | 2406 |
| O43707_C879 | ACTN4 Alpha-actinin-4 | 2407 |
| Q9NPA3_C62 | MID1IP1 Mid1-interacting | 2408 |
| | protein 1 | |
| Q5UIP0_C2450 | RIF1 Telomere-associated | 2409 |
| | protein RIF1 | |
| P41134_C17 | ID1 DNA-binding protein | 2410 |
| | inhibitor ID-1 | |
| Q13509_C129 | TUBB3 Tubulin beta-3 chain | 2411 |
| Q16718_C17 | NDUFA5 NADH | 2412 |
| | dehydrogenase | |
| Q9H6K1_C18 | C6orf106 Uncharacterized | 2413 |
| | protein C6orf106 | |
| Q13057_C144 | COASY Bifunctional | 2414 |
| | coenzyme A synthase | |
| P28838_C313 | LAP3 Cytosol aminopeptidase | 2415 |
| Q96EP0_C504 | RNF31 E3 ubiquitin-protein | 2416 |
| | ligase RNF31 | |
| P08107_C17 | HSPA1B Heat shock 70 kDa | 2417 |
| | protein 1A/1B | |
| P27708_C1455 | CAD CAD protein | 2418 |
| P23497_C309 | SP100 Nuclear autoantigen Sp- | 2419 |
| | 100 | |
| P11498_C739 | PC Pyruvate carboxylase, | 2420 |
| | mitochondrial | |
| Q02790_C396 | FKBP4 Peptidyl-prolyl cis- | 2421 |
| | trans isomerase FKBP4 | |
| P48507_C35 | GCLM Glutamate--cysteine | 2422 |
| | ligase regulatory subunit | |
| P55735_C245 | SEC13 Protein SEC13 | 2423 |
| | homolog | |
| P00367_C376 | GLUD1 Glutamate | 2424 |
| | dehydrogenase 1, | |
| | mitochondrial | |
| P52701_C1075 | MSH6 DNA mismatch repair | 2425 |
| | protein Msh6 | |
| Q14166_C612 | TTLL12 Tubulin--tyrosine | 2426 |
| | ligase-like protein 12 | |
| Q6PKG0_C502 | LARP1 La-related protein 1 | 2427 |
| Q9NVS9_C156 | PNPO Pyridoxine-5-phosphate | 2428 |
| | oxidase | |
| Q99873_C93 | PRMT1 Protein arginine N- | 2429 |
| | methyltransferase 1 | |
| Q9H4A6_C84 | GOLPH3 Golgi | 2430 |
| | phosphoprotein 3 | |
| P78347_C34 | GTF2I General transcription | 2431 |
| | factor II-I | |
| Q96FZ2_C39 | C3orf37 UPF0361 protein | 2432 |
| | C3orf37 | |
| O60547_C336 | GMDS GDP-mannose 4,6 | 2433 |
| | dehydratase | |
| P62979_C149 | RPS27A Ubiquitin-40S | 2434 |
| | ribosomal protein S27a | |
| P52732_C911 | KIF11 Kinesin-like protein | 2435 |
| | KIF11 | |
| P40938_C32 | RFC3 Replication factor C | 2436 |
| | subunit 3 | |
| P31943_C34 | HNRNPH1 Heterogeneous | 2437 |
| | nuclear ribonucleoprotein H | |
| Q8N1F7_C422 | NUP93 Nuclear pore complex | 2438 |
| | protein Nup93 | |
| Q16643_C96 | DBN1 Drebrin | 2439 |
| P45880_C76 | VDAC2 Voltage-dependent | 2440 |
| | anion-selective channel protein | |
| Q9BYG5_C13 | PARD6B Partitioning | 2441 |
| | defective 6 homolog beta | |
| P42765_C128 | ACAA2 3-ketoacyl-CoA | 2442 |
| | thiolase, mitochondrial | |
| Q96HC4_C213 | PDLIM5 PDZ and LIM | 2443 |
| | domain protein 5 | |
| O15042_C320 | U2SURP U2 snRNP- | 2444 |
| | associated SURP motif- | |
| | containing protein | |
| Q96IY1_C224 | NSL1 Kinetochore-associated | 2445 |
| | protein NSL1 homolog | |
| P12270_C1068 | TPR Nucleoprotein TPR | 2446 |
| P01591_C156 | IGJ Immunoglobulin J chain | 2447 |
| P53992_C1083 | SEC24C Protein transport | 2448 |
| | protein Sec24C | |
| Q92973_C142 | TNPO1 Transportin-1 | 2449 |
| P32321_C60 | DCTD Deoxycytidylate | 2450 |
| | deaminase | |
| P62195_C112 | PSMC5 26S protease | 2451 |
| | regulatory subunit 8 | |
| P31146_C40 | CORO1A Coronin-1A | 2452 |
| P12814_C774 | ACTN1 Alpha-actinin-1 | 2453 |
| Q04726_C528 | TLE3 Transducin-like | 2454 |
| | enhancer protein 3 | |
| Q52LJ0_C216 | FAM98B Protein FAM98B | 2455 |
| P04083_C270 | ANXA1 Annexin A1 | 2456 |
| O94925_C203 | GLS Glutaminase kidney | 2457 |
| | isoform, mitochondrial | |
| Q9GZP4_C187 | PITHD1 PITH domain- | 2458 |
| | containing protein 1 | |
| P33764_C14 | S100A3 Protein S100-A3 | 2459 |
| Q9UKK9_C76 | NUDT5 ADP-sugar | 2460 |
| | pyrophosphatase | |
| P38117_C71 | ETFB Electron transfer | 2461 |
| | flavoprotein subunit beta | |
| O95817_C151 | BAG3 BAG family molecular | 2462 |
| | chaperone regulator 3 | |
| Q27J81_C898 | INF2 Inverted formin-2 | 2463 |
| Q9C0C2_C1443 | TNKS1BP1 182 kDa | 2464 |
| | tankyrase-1-binding protein | |
| Q9C0C9_C314 | UBE2O Ubiquitin-conjugating | 2465 |
| | enzyme E2 O | |
| P84090_C69 | ERH Enhancer of rudimentary | 2466 |
| | homolog | |
| Q8TDN6_C52 | BRIX1 Ribosome biogenesis | 2467 |
| | protein BRX1 homolog | |
| P42704_C484 | LRPPRC Leucine-rich PPR | 2468 |
| | motif-containing protein, | |
| | mitochondrial | |
| Q9NR56_C53 | MBNL1 Muscleblind-like | 2469 |
| | protein 1 | |
| P14678_C43 | SNRPB Small nuclear | 2470 |
| | ribonucleoprotein-associated | |
| | protein | |
| Q86VP6_C1134 | CAND1 Cullin-associated | 2471 |
| | NEDD8-dissociated protein 1 | |
| P14324_C333 | FDPS Farnesyl pyrophosphate | 2472 |
| | synthase | |
| P07237_C312 | P4HB Protein disulfide- | 2473 |
| | isomerase | |
| Q9BXJ9_C238 | NAA15 N-alpha- | 2474 |
| | acetyltransferase 15, NatA | |
| | auxiliary subunit | |
| Q99614_C28 | TTC1 Tetratricopeptide repeat | 2475 |
| | protein 1 | |
| Q9UDY2_C914 | TJP2 Tight junction protein | 2476 |
| | ZO-2 | |
| Q06210_C254 | GFPT1 Glucosamine-- | 2477 |
| | fructose-6-phosphate | |
| | aminotransferase | |
| P55199_C14 | ELL RNA polymerase II | 2478 |
| | elongation factor ELL | |
| Q9H2U2_C180 | PPA2 Inorganic | 2479 |
| | pyrophosphatase 2, | |
| | mitochondrial | |
| Q6UB35_C779 | MTHFD1L Monofunctional | 2480 |
| | C1-tetrahydrofolate synthase, | |
| | mitochondrial | |
| P34897_C80 | SHMT2 Serine | 2481 |
| | hydroxymethyltransferase, | |
| | mitochondrial | |
| P13798_C30 | APEH Acylamino-acid- | 2482 |
| | releasing enzyme | |
| O95671_C333 | ASMTL N-acetylserotonin O- | 2483 |
| | methyltransferase-like protein | |
| O95671_C441 | ASMTL N-acetylserotonin O- | 2484 |
| | methyltransferase-like protein | |
| Q9NQW6_C309 | ANLN Actin-binding protein | 2485 |
| | anillin | |
| Q04206_C109 | RELA Transcription factor p65 | 2486 |
| P31350_C202 | RRM2 Ribonucleoside- | 2487 |
| | diphosphate reductase subunit | |
| | M2 | |
| P08107_C306 | HSPA1B Heat shock 70 kDa | 2488 |
| | protein 1A/1B | |
| O75914_C424 | PAK3 Serine/threonine-protein | 2489 |
| | kinase PAK 3 | |
| P27708_C379 | CAD CAD protein | 2490 |
| P62910_C96 | RPL32 60S ribosomal protein | 2491 |
| | L32 | |
| Q9Y570_C347 | PPME1 Protein phosphatase | 2492 |
| | methylesterase 1 | |
| Q92499_C110 | DDX1 ATP-dependent RNA | 2493 |
| | helicase DDX1 | |
| P30405_C203 | PPIF Peptidyl-prolyl cis-trans | 2494 |
| | isomerase F, mitochondrial | |
| Q92621_C1662 | NUP205 Nuclear pore | 2495 |
| | complex protein Nup205 | |
| Q14376_C196 | GALE UDP-glucose 4- | 2496 |
| | epimerase | |
| O75717_C1008 | WDHD1 WD repeat and | 2497 |
| | HMG-box DNA-binding | |
| | protein 1 | |
| Q03933_C369 | HSF2 Heat shock factor | 2498 |
| | protein 2 | |
| Q00535_C290 | CDK5 Cyclin-dependent | 2499 |
| | kinase 5 | |
| B5ME19_C753 | EIF3CL Eukaryotic translation | 2500 |
| | initiation factor 3 subunit | |
| Q9NVP2_C189 | ASF1B Histone chaperone | 2501 |
| | ASF1B | |
| Q13018_C1354 | PLA2R1 Secretory | 2502 |
| | phospholipase A2 receptor | |
| Q15181_C242 | PPA1 Inorganic | 2503 |
| | pyrophosphatase | |
| Q7Z5K2_C1170 | WAPAL Wings apart-like | 2504 |
| | protein homolog | |
| Q13642_C71 | FHL1 Four and a half LIM | 2505 |
| | domains protein 1 | |
| P48556_C274 | PSMD8 26S proteasome non- | 2506 |
| | ATPase regulatory subunit 8 | |
| Q9UBL3_C362 | ASH2L Set1/Ash2 histone | 2507 |
| | methyltransferase complex | |
| | subunit | |
| Q8TBB5_C373 | KLHDC4 Kelch domain- | 2508 |
| | containing protein 4 | |
| P07339_C329 | CTSD Cathepsin D | 2509 |
| Q7Z6Z7_C1401 | HUWE1 E3 ubiquitin-protein | 2510 |
| | ligase HUWE1 | |
| Q16514_C100 | TAF12 Transcription initiation | 2511 |
| | factor TFIID subunit 12 | |
| P63151_C239 | PPP2R2A Serine/threonine- | 2512 |
| | protein phosphatase 2A 55 kDa | |
| | regulatory subunit B alpha | |
| | isoform | |
| Q7L2H7_C175 | EIF3M Eukaryotic translation | 2513 |
| | initiation factor 3 subunit | |
| Q8NHV4_C66 | NEDD1 Protein NEDD1 | 2514 |
| P13010_C339 | XRCC5 X-ray repair cross- | 2515 |
| | complementing protein 5 | |
| P51858_C108 | HDGF Hepatoma-derived | 2516 |
| | growth factor | |
| P26038_C284 | MSN Moesin | 2517 |
| P68402_C206 | PAFAH1B2 Platelet-activating | 2518 |
| | factor acetylhydrolase IB | |
| | subunit | |
| P15407_C97 | FOSL1 Fos-related antigen 1 | 2519 |
| Q12768_C21 | KIAA0196 WASH complex | 2520 |
| | subunit strumpellin | |
| P29144_C28 | TPP2 Tripeptidyl-peptidase 2 | 2521 |
| P78371_C412 | CCT2 T-complex protein 1 | 2522 |
| | subunit beta | |
| O60711_C340 | LPXN Leupaxin | 2523 |
| Q9H9Q2_C110 | COPS7B COP9 signalosome | 2524 |
| | complex subunit 7b | |
| P40261_C165 | NNMT Nicotinamide N- | 2525 |
| | methyltransferase | |
| Q9BWJ5_C76 | SF3B5 Splicing factor 3B | 2526 |
| | subunit 5 | |
| P50479_C44 | PDLIM4 PDZ and LIM | 2527 |
| | domain protein 4 | |
| Q5JRX3_C556 | PITRM1 Presequence | 2528 |
| | protease, mitochondrial | |
| Q9ULE6_C845 | PALD1 Paladin | 2529 |
| Q9NXV6_C178 | CDKN2AIP CDKN2A- | 2530 |
| | interacting protein | |
| P13639_C67 | EEF2 Elongation factor 2 | 2531 |
| P04183_C79 | TK1 Thymidine kinase, | 2532 |
| | cytosolic | |
| Q9H8V3_C221 | ECT2 Protein ECT2 | 2533 |
| Q9NPJ6_C162 | MED4 Mediator of RNA | 2534 |
| | polymerase II transcription | |
| | subunit | |
| Q5VTR2_C924 | RNF20 E3 ubiquitin-protein | 2535 |
| | ligase BRE1A | |
| O00231_C202 | PSMD11 26S proteasome non- | 2536 |
| | ATPase regulatory subunit 11 | |
| P50995_C384 | ANXA11 Annexin A11 | 2537 |
| P62851_C59 | RPS25 40S ribosomal protein | 2538 |
| | S25 | |
| Q12906_C203 | ILF3 Interleukin enhancer- | 2539 |
| | binding factor 3 | |
| Q13315_C2770 | ATM Serine-protein kinase | 2540 |
| | ATM | |
| P22681_C508 | CBL E3 ubiquitin-protein | 2541 |
| | ligase CBL | |
| P35998_C270 | PSMC2 26S protease | 2542 |
| | regulatory subunit 7 | |
| O75570_C137 | MTRF1 Peptide chain release | 2543 |
| | factor 1, mitochondrial | |
| P35579_C1437 | MYH9 Myosin-9 | 2544 |
| P48643_C493 | CCT5 T-complex protein 1 | 2545 |
| | subunit epsilon | |
| P52209_C422 | PGD 6-phosphogluconate | 2546 |
| | dehydrogenase, | |
| | decarboxylating | |
| Q13155_C306 | AIMP2 Aminoacyl tRNA | 2547 |
| | synthase complex-interacting | |
| | multifunctional protein 2 | |
| Q14197_C82 | ICT1 Peptidyl-tRNA hydrolase | 2548 |
| | ICT1, mitochondrial | |
| C9J4G0_C66 | C17orf49 HCG32827, isoform | 2549 |
| | CRA_d | |
| P00338_C185 | LDHA L-lactate | 2550 |
| | dehydrogenase A chain | |
| Q9UBQ0_C41 | VPS29 Vacuolar protein | 2551 |
| | sorting-associated protein 29 | |
| Q15645_C14 | TRIP13 Pachytene checkpoint | 2552 |
| | protein 2 homolog | |
| Q9H1K1_C69 | ISCU Iron-sulfur cluster | 2553 |
| | assembly enzyme ISCU, | |
| | mitochondrial | |
| P30101_C244 | PDIA3 Protein disulfide- | 2554 |
| | isomerase A3 | |
| P09884_C1458 | POLA1 DNA polymerase | 2555 |
| | alpha catalytic subunit | |
| Q9NT62_C182 | ATG3 Ubiquitin-like- | 2556 |
| | conjugating enzyme ATG3 | |
| Q7L591_C323 | DOK3 Docking protein 3 | 2557 |
| Q6IA86_C487 | ELP2 Elongator complex | 2558 |
| | protein 2 | |
| P54819_C40 | AK2 Adenylate kinase 2, | 2559 |
| | mitochondrial | |
| P23610_C110 | F8A3 Factor VIII intron 22 | 2560 |
| | protein | |
| P13861_C101 | PRKAR2A cAMP-dependent | 2561 |
| | protein kinase type II-alpha | |
| | regulatory subunit | |
| Q96ER3_C366 | SAAL1 Protein SAAL1 | 2562 |
| Q92597_C272 | NDRG1 Protein NDRG1 | 2563 |
| Q6P9B6_C13 | KIAA1609 TLD domain- | 2564 |
| | containing protein KIAA1609 | |
| O75663_C14 | TIPRL TIP41-like protein | 2565 |
| Q05086_C49 | UBE3A Ubiquitin-protein | 2566 |
| | ligase E3A | |
| Q14152_C78 | EIF3A Eukaryotic translation | 2567 |
| | initiation factor 3 subunit | |
| P63244_C207 | GNB2L1 Guanine nucleotide- | 2568 |
| | binding protein subunit beta-2- | |
| | like 1 | |
| Q13509_C201 | TUBB3 Tubulin beta-3 chain | 2569 |
| Q9Y6A5_C502 | TACC3 Transforming acidic | 2570 |
| | coiled-coil-containing protein | |
| Q86W42_C314 | THOC6 THO complex subunit | 2571 |
| | 6 homolog | |
| Q92878_C157 | RAD50 DNA repair protein | 2572 |
| | RAD50 | |
| O75879_C228 | PET112 Glutamyl-tRNA(Gln) | 2573 |
| | amidotransferase subunit B, | |
| | mitochondrial | |
| Q9UHB9_C562 | SRP68 Signal recognition | 2574 |
| | particle 68 kDa protein | |
| P41250_C155 | GARS Glycine--tRNA ligase | 2575 |
| P46821_C1814 | MAP1B Microtubule- | 2576 |
| | associated protein 1B | |
| O14980_C723 | XPO1 Exportin-1 | 2577 |
| P13796_C164 | LCP1 Plastin-2 | 2578 |
| P13796_C336 | LCP1 Plastin-2 | 2579 |
| Q9Y2L1_C533 | DIS3 Exosome complex | 2580 |
| | exonuclease RRP44 | |
| Q9NQW6_C96 | ANLN Actin-binding protein | 2581 |
| | anillin | |
| P43246_C176 | MSH2 DNA mismatch repair | 2582 |
| | protein Msh2 | |
| Q9Y4L1_C352 | HYOU1 Hypoxia up-regulated | 2583 |
| | protein 1 | |
| P15153_C105 | RAC2 Ras-related C3 | 2584 |
| | botulinum toxin substrate 2 | |
| Q9H0G5_C232 | NSRP1 Nuclear speckle | 2585 |
| | splicing regulatory protein 1 | |
| P48507_C194 | GCLM Glutamate--cysteine | 2586 |
| | ligase regulatory subunit | |
| Q9BRX5_C188 | GINS3 DNA replication | 2587 |
| | complex GINS protein PSF3 | |
| Q9NR09_C543 | BIRC6 Baculoviral IAP | 2588 |
| | repeat-containing protein 6 | |
| Q13813_C1314 | SPTAN1 Spectrin alpha chain, | 2589 |
| | non-erythrocytic 1 | |
| Q10713_C466 | PMPCA Mitochondrial- | 2590 |
| | processing peptidase subunit | |
| | alpha | |
| Q9H7N4_C1098 | SCAF1 Splicing factor, | 2591 |
| | arginine/serine-rich 19 | |
| Q9NXA8_C303 | SIRT5 NAD-dependent protein | 2592 |
| | deacylase sirtuin-5, | |
| | mitochondrial | |
| P83916_C60 | CBX1 Chromobox protein | 2593 |
| | homolog 1 | |
| O00410_C110 | IPO5 Importin-5 | 2594 |
| P57764_C457 | GSDMD Gasdermin-D | 2595 |
| P15170_C327 | GSPT1 Eukaryotic peptide | 2596 |
| | chain release factor GTP- | |
| | binding | |
| Q9BWD1_C360 | ACAT2 Acetyl-CoA | 2597 |
| | acetyltransferase, cytosolic | |
| P04818_C180 | TYMS Thymidylate synthase | 2598 |
| Q9BQ69_C276 | MACROD1 O-acetyl-ADP- | 2599 |
| | ribose deacetylase MACROD1 | |
| Q01970_C834 | PLCB3 1-phosphatidylinositol | 2600 |
| | 4,5-bisphosphate phosphodie | |
| Q9Y6E0_C394 | STK24 Serine/threonine- | 2601 |
| | protein kinase 24 | |
| P53634_C136 | CTSC Dipeptidyl peptidase 1 | 2602 |
| Q9UGP4_C431 | LIMD1 LIM domain- | 2603 |
| | containing protein 1 | |
| O75369_C455 | FLNB Filamin-B | 2604 |
| P21980_C554 | TGM2 Protein-glutamine | 2605 |
| | gamma-glutamyltransferase 2 | |
| P30281_C47 | CCND3 G1/S-specific cyclin- | 2606 |
| | D3 | |
| P49790_C1129 | NUP153 Nuclear pore | 2607 |
| | complex protein Nup153 | |
| Q93008_C673 | USP9X Probable ubiquitin | 2608 |
| | carboxyl-terminal hydrolase | |
| | FAF | |
| Q9Y613_C31 | FHOD1 FH1/FH2 domain- | 2609 |
| | containing protein 1 | |
| Q9BXB5_C203 | OSBPL10 Oxysterol-binding | 2610 |
| | protein-related protein 10 | |
| P62633_C97 | CNBP Cellular nucleic acid- | 2611 |
| | binding protein | |
| Q14005_C1016 | IL16 Pro-interleukin-16 | 2612 |
| Q9UPQ0_C863 | LIMCH1 LIM and calponin | 2613 |
| | homology domains-containing | |
| | protein | |
| Q9HD26_C408 | GOPC Golgi-associated PDZ | 2614 |
| | and coiled-coil motif- | |
| | containing | |
| P07900_C481 | HSP90AA1 Heat shock protein | 2615 |
| | HSP 90-alpha | |
| P21333_C717 | FLNA Filamin-A | 2616 |
| P21333_C2582 | FLNA Filamin-A | 2617 |
| P13010_C235 | XRCC5 X-ray repair cross- | 2618 |
| | complementing protein 5 | |
| O95347_C46 | SMC2 Structural maintenance | 2619 |
| | of chromosomes protein 2 | |
| P68402_C188 | PAFAH1B2 Platelet-activating | 2620 |
| | factor acetylhydrolase IB | |
| | subunit | |
| P61962_C256 | DCAF7 DDB1- and CUL4- | 2621 |
| | associated factor 7 | |
| P49327_C1118 | FASN Fatty acid synthase | 2622 |
| P49321_C84 | NASP Nuclear autoantigenic | 2623 |
| | sperm protein | |
| Q14019_C52 | COTL1 Coactosin-like protein | 2624 |
| Q9NYK5_C335 | MRPL39 39S ribosomal | 2625 |
| | protein L39, mitochondrial | |
| P55160_C338 | NCKAP1L Nck-associated | 2626 |
| | protein 1-like | |
| P10599_C69 | TXN Thioredoxin | 2627 |
| P14921_C31 | ETS1 Protein C-ets-1 | 2628 |
| Q8NBJ5_C412 | GLT25D1 Procollagen | 2629 |
| | galactosyltransferase 1 | |
| Q13200_C448 | PSMD2 26S proteasome non- | 2630 |
| | ATPase regulatory subunit 2 | |
| Q9ULW0_C364 | TPX2 Targeting protein for | 2631 |
| | Xklp2 | |
| P09914_C138 | IFIT1 Interferon-induced | 2632 |
| | protein with tetratricopeptide | |
| O14744_C449 | PRMT5 Protein arginine N- | 2633 |
| | methyltransferase 5 | |
| Q6NXT1_C230 | ANKRD54 Ankyrin repeat | 2634 |
| | domain-containing protein 54 | |
| Q5VT52_C649 | RPRD2 Regulation of nuclear | 2635 |
| | pre-mRNA domain-containing | |
| | P | |
| P22314_C200 | UBA1 Ubiquitin-like modifier- | 2636 |
| | activating enzyme 1 | |
| P22314_C431 | UBA1 Ubiquitin-like modifier- | 2637 |
| | activating enzyme 1 | |
| Q8IU81_C280 | IRF2BP1 Interferon regulatory | 2638 |
| | factor 2-binding protein 1 | |
| Q5T160_C576 | RARS2 Probable arginine-- | 2639 |
| | tRNA ligase, mitochondrial | |
| Q86UV5_C986 | USP48 Ubiquitin carboxyl- | 2640 |
| | terminal hydrolase 48 | |
| P04083_C343 | ANXA1 Annexin A1 | 2641 |
| Q8NFF5_C236 | FLAD1 FAD synthase | 2642 |
| P04150_C367 | NR3C1 Glucocorticoid | 2643 |
| | receptor | |
| Q9H269_C490 | VPS16 Vacuolar protein | 2644 |
| | sorting-associated protein 16 | |
| | homolog | |
| Q969Z0_C417 | TBRG4 Protein TBRG4 | 2645 |
| Q9ULC4_C113 | MCTS1 Malignant T-cell- | 2646 |
| | amplified sequence 1 | |
| Q15306_C343 | IRF4 Interferon regulatory | 2647 |
| | factor 4 | |
| Q15013_C124 | MAD2L1BP MAD2L1- | 2648 |
| | binding protein | |
| P45974_C532 | USP5 Ubiquitin carboxyl- | 2649 |
| | terminal hydrolase 5 | |
| O95817_C179 | BAG3 BAG family molecular | 2650 |
| | chaperone regulator 3 | |
| Q99797_C687 | MIPEP Mitochondrial | 2651 |
| | intermediate peptidase | |
| P35579_C896 | MYH9 Myosin-9 | 2652 |
| O94855_C853 | SEC24D Protein transport | 2653 |
| | protein Sec24D | |
| O14965_C393 | AURKA Aurora kinase A | 2654 |
| Q9BQA1_C65 | WDR77 Methylosome protein | 2655 |
| | 50 | |
| Q27J81_C284 | INF2 Inverted formin-2 | 2656 |
| P30048_C108 | PRDX3 Thioredoxin- | 2657 |
| | dependent peroxide reductase, | |
| | mitochondrial | |
| P22102_C646 | GART Trifunctional purine | 2658 |
| | biosynthetic protein adenosin | |
| P62316_C63 | SNRPD2 Small nuclear | 2659 |
| | ribonucleoprotein Sm D2 | |
| P09884_C141 | POLA1 DNA polymerase | 2660 |
| | alpha catalytic subunit | |
| Q7L591_C493 | DOK3 Docking protein 3 | 2661 |
| O00159_C161 | MYO1C Unconventional | 2662 |
| | myosin-Ic | |
| O00151_C73 | PDLIM1 PDZ and LIM | 2663 |
| | domain protein 1 | |
| O00151_C263 | PDLIM1 PDZ and LIM | 2664 |
| | domain protein 1 | |
| P62136_C171 | PPP1CA Serine/threonine- | 2665 |
| | protein phosphatase PP1-alpha | |
| | catalytic subunit | |
| P55060_C853 | CSE1L Exportin-2 | 2666 |
| O95232_C58 | LUC7L3 Luc7-like protein 3 | 2667 |
| P29590_C338 | PML Protein PML | 2668 |
| Q8IXK0_C673 | PHC2 Polyhomeotic-like | 2669 |
| | protein 2 | |
| Q14980_C1729 | NUMA1 Nuclear mitotic | 2670 |
| | apparatus protein 1 | |
| P63244_C286 | GNB2L1 Guanine nucleotide- | 2671 |
| | binding protein subunit beta-2- | |
| | like 1 | |
| P62333_C347 | PSMC6 26S protease | 2672 |
| | regulatory subunit 10B R | |
| Q13501_C113 | SQSTM1 Sequestosome-1 | 2673 |
| P60866_C36 | RPS20 40S ribosomal protein | 2674 |
| | S20 | |
| Q969E8_C17 | TSR2 Pre-rRNA-processing | 2675 |
| | protein TSR2 homolog | |
| Q93052_C262 | LPP Lipoma-preferred partner | 2676 |
| P08758_C316 | ANXA5 Annexin A5 | 2677 |
| O75616_C150 | ERAL1 GTPase Era, | 2678 |
| | mitochondrial | |
| Q9UHB9_C525 | SRP68 Signal recognition | 2679 |
| | particle 68 kDa protein | |
| Q9H223_C175 | EHD4 EH domain-containing | 2680 |
| | protein 4 | |
| P08107_C603 | HSPA1B Heat shock 70 kDa | 2681 |
| | protein 1A/1B | |
| P27708_C183 | CAD CAD protein | 2682 |
| Q9Y4L1_C805 | HYOU1 Hypoxia up-regulated | 2683 |
| | protein 1 | |
| P26358_C1125 | DNMT1 DNA (cytosine-5)- | 2684 |
| | methyltransferase 1 | |
| P36954_C52 | POLR2I DNA-directed RNA | 2685 |
| | polymerase II subunit RPB9 | |
| P49748_C156 | ACADVL Very long-chain | 2686 |
| | specific acyl-CoA | |
| | dehydrogenase, mitochondrial | |
| Q9H2G2_C1212 | SLK STE20-like | 2687 |
| | serine/threonine-protein kinase | |
| P35268_C25 | RPL22 60S ribosomal protein | 2688 |
| | L22 | |
| P46939_C539 | UTRN Utrophin | 2689 |
| P49368_C173 | CCT3 T-complex protein 1 | 2690 |
| | subunit gamma | |
| P50135_C82 | HNMT Histamine N- | 2691 |
| | methyltransferase | |
| Q6Y7W6_C938 | GIGYF2 PERQ amino acid- | 2692 |
| | rich with GYF domain- | |
| | containing protein 2 | |
| O95861_C59 | BPNT1 3(2),5-bisphosphate | 2693 |
| | nucleotidase 1 | |
| P49023_C290 | PXN Paxillin | 2694 |
| Q99873_C216 | PRMT1 Protein arginine N- | 2695 |
| | methyltransferase 1 | |
| P02765_C132 | AHSG Alpha-2-HS- | 2696 |
| | glycoprotein | |
| Q9H3M7_C120 | TXNIP Thioredoxin- | 2697 |
| | interacting protein | |
| Q9UPN3_C4825 | MACF1 Microtubule-actin | 2698 |
| | cross-linking factor 1, isoforms | |
| Q9UPN9_C150 | TRIM33 E3 ubiquitin-protein | 2699 |
| | ligase TRIM33 | |
| O75369_C1158 | FLNB Filamin-B | 2700 |
| P56545_C140 | CTBP2 C-terminal-binding | 2701 |
| | protein 2 | |
| Q00341_C948 | HDLBP Vigilin | 2702 |
| P35250_C171 | RFC2 Replication factor C | 2703 |
| | subunit 2 | |
| P46013_C1285 | MKI67 Antigen KI-67 | 2704 |
| O75083_C225 | WDR1 WD repeat-containing | 2705 |
| | protein 1 | |
| O43252_C165 | PAPSS1 Bifunctional 3- | 2706 |
| | phosphoadenosine 5- | |
| | phosphosulfate | |
| Q16512_C317 | PKN1 Serine/threonine-protein | 2707 |
| | kinase N1 | |
| Q16881_C339 | TXNRD1 Thioredoxin | 2708 |
| | reductase 1, cytoplasmic | |
| P21333_C478 | FLNA Filamin-A | 2709 |
| P21333_C2378 | FLNA Filamin-A | 2710 |
| O00268_C867 | TAF4 Transcription initiation | 2711 |
| | factor TFIID subunit 4 | |
| O95340_C117 | PAPSS2 Bifunctional 3- | 2712 |
| | phosphoadenosine 5- | |
| | phosphosulfate | |
| P42765_C382 | ACAA2 3-ketoacyl-CoA | 2713 |
| | thiolase, mitochondrial | |
| Q9UI12_C85 | ATP6V1H V-type proton | 2714 |
| | ATPase subunit H | |
| Q05655_C127 | PRKCD Protein kinase C delta | 2715 |
| | type | |
| P42166_C629 | TMPO Lamina-associated | 2716 |
| | polypeptide 2, isoform alpha | |
| O14929_C27 | HAT1 Histone | 2717 |
| | acetyltransferase type B | |
| | catalytic subunit L | |
| Q9NYK5_C133 | MRPL39 39S ribosomal | 2718 |
| | protein L39, mitochondrial | |
| O60234_C96 | GMFG Glia maturation factor | 2719 |
| | gamma | |
| F8VZW7_C74 | Uncharacterized protein | 2720 |
| Q12888_C1040 | TP53BP1 Tumor suppressor | 2721 |
| | p53-binding protein 1 | |
| Q5JTZ9_C609 | AARS2 Alanine--tRNA ligase, | 2722 |
| | mitochondrial | |
| Q9Y383_C44 | LUC7L2 Putative RNA- | 2723 |
| | binding protein Luc7-like 2 | |
| Q6P1R3_C99 | MSANTD2 Myb/SANT-like | 2724 |
| | DNA-binding domain- | |
| | containing protei | |
| Q99832_C364 | CCT7 T-complex protein 1 | 2725 |
| | subunit eta | |
| Q9NRW4_C124 | DUSP22 Dual specificity | 2726 |
| | protein phosphatase 22 | |
| Q8N163_C238 | KIAA1967 DBIRD complex | 2727 |
| | subunit KIAA1967 | |
| Q8N163_C443 | KIAA1967 DBIRD complex | 2728 |
| | subunit KIAA1967 | |
| Q15149_C1136 | PLEC Plectin | 2729 |
| Q15149_C4454 | PLEC Plectin | 2730 |
| P31146_C285 | CORO1A Coronin-1A | 2731 |
| Q16555_C248 | DPYSL2 | 2732 |
| | Dihydropyrimidinase-related | |
| | protein 2 | |
| Q99567_C713 | NUP88 Nuclear pore complex | 2733 |
| | protein Nup88 | |
| P21964_C119 | COMT Catechol O- | 2734 |
| | methyltransferase | |
| P62857_C27 | RPS28 40S ribosomal protein | 2735 |
| | S28 | |
| Q9P287_C275 | BCCIP BRCA2 and | 2736 |
| | CDKN1A-interacting protein | |
| Q7LBC6_C1470 | KDM3B Lysine-specific | 2737 |
| | demethylase 3B | |
| P62140_C171 | PPP1CB Serine/threonine- | 2738 |
| | protein phosphatase PP1-beta | |
| | catalytic subunit | |
| P33764_C68 | S100A3 Protein S100-A3 | 2739 |
| Q9UBQ7_C123 | GRHPR Glyoxylate | 2740 |
| | reductase/hydroxypyruvate | |
| | reductase | |
| Q9UJY4_C343 | GGA2 ADP-ribosylation | 2741 |
| | factor-binding protein GGA2 | |
| O60841_C1092 | EIF5B Eukaryotic translation | 2742 |
| | initiation factor 5B | |
| Q92945_C296 | KHSRP Far upstream element- | 2743 |
| | binding protein 2 | |
| Q9HAV4_C941 | XPO5 Exportin-5 | 2744 |
| O14964_C185 | HGS Hepatocyte growth | 2745 |
| | factor-regulated tyrosine | |
| | kinase | |
| P23526_C195 | AHCY | 2746 |
| | Adenosylhomocysteinase | |
| P52209_C289 | PGD 6-phosphogluconate | 2747 |
| | dehydrogenase, | |
| | decarboxylating | |
| Q9Y697_C381 | NFS1 Cysteine desulfurase, | 2748 |
| | mitochondrial | |
| Q9Y520_C177 | PRRC2C Protein PRRC2C | 2749 |
| Q9H910_C118 | HN1L Hematological and | 2750 |
| | neurological expressed 1-like | |
| | protein | |
| Q6FI81_C92 | CIAPIN1 Anamorsin | 2751 |
| Q8WZA9_C340 | IRGQ Immunity-related | 2752 |
| | GTPase family Q protein | |
| Q8NDH3_C81 | NPEPL1 Probable | 2753 |
| | aminopeptidase NPEPL1 | |
| O00571_C317 | DDX3X ATP-dependent RNA | 2754 |
| | helicase DDX3X | |
| P05091_C179 | ALDH2 Aldehyde | 2755 |
| | dehydrogenase, mitochondrial | |
| P05091_C472 | ALDH2 Aldehyde | 2756 |
| | dehydrogenase, mitochondrial | |
| O15235_C132 | MRPS12 28S ribosomal | 2757 |
| | protein S12, mitochondrial | |
| P42704_C130 | LRPPRC Leucine-rich PPR | 2758 |
| | motif-containing protein, | |
| | mitochondrial | |
| Q99590_C566 | SCAF11 Protein SCAF11 | 2759 |
| Q9NR56_C19 | MBNL1 Muscleblind-like | 2760 |
| | protein 1 | |
| Q9P2E9_C1038 | RRBP1 Ribosome-binding | 2761 |
| | protein 1 | |
| P52888_C682 | THOP1 Thimet oligopeptidase | 2762 |
| P55212_C264 | CASP6 Caspase-6 | 2763 |
| Q6IBW4_C342 | NCAPH2 Condensin-2 | 2764 |
| | complex subunit H2 | |
| P18754_C352 | RCC1 Regulator of | 2765 |
| | chromosome condensation | |
| Q8TB52_C433 | FBXO30 F-box only protein | 2766 |
| | 30 | |
| Q32MZ4_C644 | LRRFIP1 Leucine-rich repeat | 2767 |
| | flightless-interacting protein | |
| Q9NYL2_C150 | MLTK Mitogen-activated | 2768 |
| | protein kinase kinase kinase | |
| | MLT | |
| Q15393_C1156 | SF3B3 Splicing factor 3B | 2769 |
| | subunit 3 | |
| P63244_C168 | GNB2L1 Guanine nucleotide- | 2770 |
| | binding protein subunit beta-2- | |
| | like 1 | |
| Q53EL6_C275 | PDCD4 Programmed cell | 2771 |
| | death protein 4 | |
| P56537_C152 | EIF6 Eukaryotic translation | 2772 |
| | initiation factor 6 | |
| P09622_C484 | DLD Dihydrolipoyl | 2773 |
| | dehydrogenase, mitochondrial | |
| Q9Y314_C185 | NOSIP Nitric oxide synthase- | 2774 |
| | interacting protein | |
| Q96P16_C151 | RPRD1A Regulation of | 2775 |
| | nuclear pre-mRNA domain- | |
| | containing p | |
| P46821_C2041 | MAP1B Microtubule- | 2776 |
| | associated protein 1B | |
| O60343_C266 | TBC1D4 TBC1 domain family | 2777 |
| | member 4 | |
| Q96EB1_C361 | ELP4 Elongator complex | 2778 |
| | protein 4 | |
| Q86WB0_C102 | ZC3HC1 Nuclear-interacting | 2779 |
| | partner of ALK | |
| P49915_C104 | GMPS GMP synthase | 2780 |
| O75608_C144 | LYPLA1 Acyl-protein | 2781 |
| | thioesterase 1 | |
| P11498_C131 | PC Pyruvate carboxylase, | 2782 |
| | mitochondrial | |
| P11498_C752 | PC Pyruvate carboxylase, | 2783 |
| | mitochondrial | |
| Q53H96_C266 | PYCRL Pyrroline-5- | 2784 |
| | carboxylate reductase 3 | |
| Q96DE5_C55 | ANAPC16 Anaphase- | 2785 |
| | promoting complex subunit 16 | |
| Q96KB5_C112 | PBK Lymphokine-activated | 2786 |
| | killer T-cell-originated prot | |
| P55084_C458 | HADHB Trifunctional enzyme | 2787 |
| | subunit beta, mitochondrial | |
| P55735_C234 | SEC13 Protein SEC13 | 2788 |
| | homolog | |
| P56192_C287 | MARS Methionine--tRNA | 2789 |
| | ligase, cytoplasmic | |
| P07384_C115 | CAPN1 Calpain-1 catalytic | 2790 |
| | subunit | |
| P08559_C222 | PDHA1 Pyruvate | 2791 |
| | dehydrogenase E1 component | |
| | subunit alpha, | |
| Q99714_C91 | HSD17B10 3-hydroxyacyl- | 2792 |
| | CoA dehydrogenase type-2 | |
| P33992_C197 | MCM5 DNA replication | 2793 |
| | licensing factor MCM5 | |
| P49757_C611 | NUMB Protein numb homolog | 2794 |
| O15269_C438 | SPTLC1 Serine | 2795 |
| | palmitoyltransferase 1 | |
| O75935_C173 | DCTN3 Dynactin subunit 3 | 2796 |
| Q8IU85_C182 | CAMK1D | 2797 |
| | Calcium/calmodulin-dependent | |
| | protein kinase type 1 | |
| Q05519_C455 | SRSF11 Serine/arginine-rich | 2798 |
| | splicing factor 11 | |
| P36578_C125 | RPL4 60S ribosomal protein | 2799 |
| | L4 | |
| Q96E14_C95 | RMI2 RecQ-mediated genome | 2800 |
| | instability protein 2 | |
| Q96N67_C457 | DOCK7 Dedicator of | 2801 |
| | cytokinesis protein 7 | |
| Q7Z5K2_C160 | WAPAL Wings apart-like | 2802 |
| | protein homolog | |
| P41214_C489 | EIF2D Eukaryotic translation | 2803 |
| | initiation factor 2D | |
| O43242_C483 | PSMD3 26S proteasome non- | 2804 |
| | ATPase regulatory subunit 3 | |
| O75369_C1280 | FLNB Filamin-B | 2805 |
| Q8IWI9_C2974 | MGA MAX gene-associated | 2806 |
| | protein | |
| O15067_C785 | PFAS | 2807 |
| | Phosphoribosylformylglycinamidine | |
| | synthase | |
| Q96GX9_C16 | APIP Probable | 2808 |
| | methylthioribulose-1- | |
| | phosphate dehydratase | |
| Q9BXP5_C412 | SRRT Serrate RNA effector | 2809 |
| | molecule homolog | |
| O75083_C382 | WDR1 WD repeat-containing | 2810 |
| | protein 1 | |
| Q8WVV9_C535 | HNRPLL Heterogeneous | 2811 |
| | nuclear ribonucleoprotein L- | |
| | like | |
| Q7Z6Z7_C1891 | HUWE1 E3 ubiquitin-protein | 2812 |
| | ligase HUWE1 | |
| Q7Z6Z7_C3296 | HUWE1 E3 ubiquitin-protein | 2813 |
| | ligase HUWE1 | |
| Q14008_C1500 | CKAP5 Cytoskeleton- | 2814 |
| | associated protein 5 | |
| Q9H3P2_C44 | WHSC2 Negative elongation | 2815 |
| | factor A | |
| Q8NB37_C154 | PDDC1 Parkinson disease 7 | 2816 |
| | domain-containing protein 1 | |
| P48047_C141 | ATP5O ATP synthase subunit | 2817 |
| | O, mitochondrial | |
| Q8IUI8_C95 | CRLF3 Cytokine receptor-like | 2818 |
| | factor 3 | |
| Q9H6S3_C261 | EPS8L2 Epidermal growth | 2819 |
| | factor receptor kinase substrate | |
| P21333_C53 | FLNA Filamin-A | 2820 |
| Q5T4S7_C3864 | UBR4 E3 ubiquitin-protein | 2821 |
| | ligase UBR4 | |
| P46060_C82 | RANGAP1 Ran GTPase- | 2822 |
| | activating protein 1 | |
| O14929_C299 | HAT1 Histone | 2823 |
| | acetyltransferase type B | |
| | catalytic subunit | |
| P48059_C272 | LIMS1 LIM and senescent cell | 2824 |
| | antigen-like-containing | |
| | domains 1 | |
| O15042_C65 | U2SURP U2 snRNP- | 2825 |
| | associated SURP motif- | |
| | containing protein | |
| Q7L2J0_C244 | MEPCE 7SK snRNA | 2826 |
| | methylphosphate capping | |
| | enzyme | |
| Q4G176_C399 | ACSF3 Acyl-CoA synthetase | 2827 |
| | family member 3, | |
| | mitochondrial | |
| Q9H1B7_C504 | IRF2BPL Interferon regulatory | 2828 |
| | factor 2-binding protein-lik | |
| O95425_C26 | SVIL Supervillin | 2829 |
| O75351_C240 | VPS4B Vacuolar protein | 2830 |
| | sorting-associated protein 4B | |
| Q96DC7_C57 | TMCO6 Transmembrane and | 2831 |
| | coiled-coil domain-containing | |
| | pr | |
| Q9ULW0_C594 | TPX2 Targeting protein for | 2832 |
| | Xklp2 | |
| P50502_C209 | ST13 Hsc70-interacting | 2833 |
| | protein | |
| P31146_C51 | CORO1A Coronin-1A | 2834 |
| P31146_C345 | CORO1A Coronin-1A | 2835 |
| Q9H2M9_C67 | RAB3GAP2 Rab3 GTPase- | 2836 |
| | activating protein non-catalytic | |
| | subunit | |
| Q9UKV3_C546 | ACIN1 Apoptotic chromatin | 2837 |
| | condensation inducer in the | |
| | nucleus | |
| P78527_C1229 | PRKDC DNA-dependent | 2838 |
| | protein kinase catalytic subunit | |
| P78527_C1364 | PRKDC DNA-dependent | 2839 |
| | protein kinase catalytic subunit | |
| P42566_C657 | EPS15 Epidermal growth | 2840 |
| | factor receptor substrate 15 | |
| P61981_C112 | YWHAG 14-3-3 protein | 2841 |
| | gamma | |
| P20810_C381 | CAST Calpastatin | 2842 |
| P55036_C58 | PSMD4 26S proteasome non- | 2843 |
| | ATPase regulatory subunit 4 | |
| P50991_C295 | CCT4 T-complex protein 1 | 2844 |
| | subunit delta | |
| Q96TA1_C230 | FAM129B Niban-like protein | 2845 |
| | 1 | |
| P49848_C141 | TAF6 Transcription initiation | 2846 |
| | factor TFIID subunit 6 | |
| Q14315_C1066 | FLNC Filamin-C | 2847 |
| O94925_C525 | GLS Glutaminase kidney | 2848 |
| | isoform, mitochondrial | |
| Q92796_C519 | DLG3 Disks large homolog 3 | 2849 |
| O95571_C219 | ETHE1 Protein ETHE1, | 2850 |
| | mitochondrial | |
| Q9ULU8_C800 | CADPS Calcium-dependent | 2851 |
| | secretion activator 1 | |
| P50453_C335 | SERPINB9 Serpin B9 | 2852 |
| O95999_C215 | BCL10 B-cell | 2853 |
| | lymphoma/leukemia 10 | |
| Q9H4Z3_C29 | PCIF1 Phosphorylated CTD- | 2854 |
| | interacting factor 1 | |
| P22692_C204 | IGFBP4 Insulin-like growth | 2855 |
| | factor-binding protein 4 | |
| O00148_C223 | DDX39A ATP-dependent | 2856 |
| | RNA helicase DDX39A | |
| Q5VYK3_C814 | ECM29 Proteasome-associated | 2857 |
| | protein ECM29 homolog | |
| Q9NVE7_C537 | PANK4 Pantothenate kinase 4 | 2858 |
| O95801_C63 | TTC4 Tetratricopeptide repeat | 2859 |
| | protein 4 | |
| Q14204_C2142 | DYNC1H1 Cytoplasmic | 2860 |
| | dynein 1 heavy chain 1 | |
| P48735_C418 | IDH2 Isocitrate dehydrogenase | 2861 |
| O15371_C258 | EIF3D Eukaryotic translation | 2862 |
| | initiation factor 3 subunit | |
| O00571_C128 | DDX3X ATP-dependent RNA | 2863 |
| | helicase DDX3X | |
| Q8WVC0_C530 | LEO1 RNA polymerase- | 2864 |
| | associated protein LEO1 | |
| O15235_C64 | MRPS12 28S ribosomal | 2865 |
| | protein S12, mitochondrial | |
| Q9P2I0_C621 | CPSF2 Cleavage and | 2866 |
| | polyadenylation specificity | |
| | factor subunit | |
| Q9H4X1_C33 | RGCC Regulator of cell cycle | 2867 |
| | RGCC | |
| Q7L5N1_C299 | COPS6 COP9 signalosome | 2868 |
| | complex subunit 6 | |
| Q6NYC8_C611 | PPP1R18 Phostensin | 2869 |
| P22626_C50 | HNRNPA2B1 Heterogeneous | 2870 |
| | nuclear ribonucleoproteins | |
| | A2/B1 | |
| P55072_C105 | VCP Transitional endoplasmic | 2871 |
| | reticulum ATPase | |
| P11912_C196 | CD79A B-cell antigen receptor | 2872 |
| | complex-associated protein | |
| Q9NSE4_C91 | IARS2 Isoleucine--tRNA | 2873 |
| | ligase, mitochondrial | |
| Q9NSE4_C819 | IARS2 Isoleucine--tRNA | 2874 |
| | ligase, mitochondrial | |
| Q9NYF8_C688 | BCLAF1 Bcl-2-associated | 2875 |
| | transcription factor 1 | |
| Q15393_C750 | SF3B3 Splicing factor 3B | 2876 |
| | subunit 3 | |
| Q16576_C166 | RBBP7 Histone-binding | 2877 |
| | protein RBBP7 | |
| Q9NZB2_C279 | FAM120A Constitutive | 2878 |
| | coactivator of PPAR-gamma- | |
| | like protein 1 | |
| Q15052_C25 | ARHGEF6 Rho guanine | 2879 |
| | nucleotide exchange factor 6 | |
| P09622_C80 | DLD Dihydrolipoyl | 2880 |
| | dehydrogenase, mitochondrial | |
| Q96EP0_C551 | RNF31 E3 ubiquitin-protein | 2881 |
| | ligase RNF31 | |
| P50579_C121 | METAP2 Methionine | 2882 |
| | aminopeptidase 2 | |
| Q7Z434_C133 | MAVS Mitochondrial | 2883 |
| | antiviral-signaling protein | |
| Q29RF7_C327 | PDS5A Sister chromatid | 2884 |
| | cohesion protein PDS5 | |
| | homolog A | |
| Q86WB0_C406 | ZC3HC1 Nuclear-interacting | 2885 |
| | partner of ALK | |
| Q9Y490_C1953 | TLN1 Talin-1 | 2886 |
| P43243_C230 | MATR3 Matrin-3 | 2887 |
| P62913_C72 | RPL11 60S ribosomal protein | 2888 |
| | L11 | |
| O00422_C26 | SAP18 Histone deacetylase | 2889 |
| | complex subunit SAP18 | |
| O60921_C200 | HUS1 Checkpoint protein | 2890 |
| | HUS1 | |
| O96017_C385 | CHEK2 Serine/threonine- | 2891 |
| | protein kinase Chk2 | |
| P36969_C93 | GPX4 Phospholipid | 2892 |
| | hydroperoxide glutathione | |
| | peroxidase, | |
| Q96IZ0_C173 | PAWR PRKC apoptosis WT1 | 2893 |
| | regulator protein | |
| P36871_C101 | PGM1 Phosphoglucomutase-1 | 2894 |
| Q9BXF6_C337 | RAB11FIP5 Rab11 family- | 2895 |
| | interacting protein 5 | |
| Q99873_C262 | PRMT1 Protein arginine N- | 2896 |
| | methyltransferase 1 | |
| P09382_C43 | LGALS1 Galectin-1 | 2897 |
| O75934_C132 | BCAS2 Pre-mRNA-splicing | 2898 |
| | factor SPF27 | |
| Q92538_C685 | GBF1 Golgi-specific brefeldin | 2899 |
| | A-resistance guanine | |
| | nucleotide exchange factor 1 | |
| P55039_C99 | DRG2 Developmentally- | 2900 |
| | regulated GTP-binding protein | |
| | 2 | |
| O43414_C285 | ERI3 ERI1 exoribonuclease 3 | 2901 |
| Q14974_C228 | KPNB1 Importin subunit beta- | 2902 |
| | 1 | |
| P30050_C17 | RPL12 60S ribosomal protein | 2903 |
| | L12 | |
| P78347_C475 | GTF2I General transcription | 2904 |
| | factor II-I | |
| Q9H3M7_C247 | TXNIP Thioredoxin- | 2905 |
| | interacting protein | |
| P08047_C68 | SP1 Transcription factor Sp1 | 2906 |
| O43242_C210 | PSMD3 26S proteasome non- | 2907 |
| | ATPase regulatory subunit 3 | |
| Q9UPN3_C4206 | MACF1 Microtubule-actin | 2908 |
| | cross-linking factor 1, isoforms | |
| Q14103_C126 | HNRNPD Heterogeneous | 2909 |
| | nuclear ribonucleoprotein D0 | |
| Q9BY32_C33 | ITPA Inosine triphosphate | 2910 |
| | pyrophosphatase | |
| Q9BQ52_C670 | ELAC2 Zinc | 2911 |
| | phosphodiesterase ELAC | |
| | protein 2 | |
| O15067_C318 | PFAS | 2912 |
| | Phosphoribosylformylglycinamidine | |
| | synthase | |
| Q9H9J2_C53 | MRPL44 39S ribosomal | 2913 |
| | protein L44, mitochondrial | |
| Q00610_C151 | CLTC Clathrin heavy chain 1 | 2914 |
| P09497_C199 | CLTB Clathrin light chain B | 2915 |
| Q9Y617_C224 | PSAT1 Phosphoserine | 2916 |
| | aminotransferase | |
| P46013_C1007 | MKI67 Antigen KI-67 | 2917 |
| Q9BSD7_C101 | NTPCR Cancer-related | 2918 |
| | nucleoside-triphosphatase | |
| Q7Z6Z7_C349 | HUWE1 E3 ubiquitin-protein | 2919 |
| | ligase HUWE1 | |
| Q14919_C54 | DRAP1 Dr1-associated | 2920 |
| | corepressor | |
| Q9UNE7_C199 | STUB1 E3 ubiquitin-protein | 2921 |
| | ligase CHIP | |
| Q16881_C515 | TXNRD1 Thioredoxin | 2922 |
| | reductase 1, cytoplasmic | |
| P09936_C220 | UCHL1 Ubiquitin carboxyl- | 2923 |
| | terminal hydrolase isozyme L1 | |
| Q9NZJ9_C147 | NUDT4 Diphosphoinositol | 2924 |
| | polyphosphate | |
| | phosphohydrolase 2 | |
| Q5T4S7_C2554 | UBR4 E3 ubiquitin-protein | 2925 |
| | ligase UBR4 | |
| Q96C19_C53 | EFHD2 EF-hand domain- | 2926 |
| | containing protein D2 | |
| Q8N6M0_C292 | OTUD6B OTU domain- | 2927 |
| | containing protein 6B | |
| Q8N201_C1633 | INTS1 Integrator complex | 2928 |
| | subunit 1 | |
| O95294_C301 | RASAL1 RasGAP-activating- | 2929 |
| | like protein 1 | |
| Q9UKX7_C181 | NUP50 Nuclear pore complex | 2930 |
| | protein Nup50 | |
| Q92616_C1595 | GCN1L1 Translational | 2931 |
| | activator GCN1 | |
| P49327_C2024 | FASN Fatty acid synthase | 2932 |
| Q16877_C106 | PFKFB4 6-phosphofructo-2- | 2933 |
| | kinase/fructose-2,6- | |
| | bisphosphatase | |
| Q96JP5_C182 | ZFP91 E3 ubiquitin-protein | 2934 |
| | lgase ZFP91 | |
| Q99538_C50 | LGMN Legumain | 2935 |
| Q96RS6_C32 | NUDCD1 NudC domain- | 2936 |
| | containing protein 1 | |
| Q96RS6_C513 | NUDCD1 NudC domain- | 2937 |
| | containing protein 1 | |
| Q8TBC4_C28 | UBA3 NEDD8-activating | 2938 |
| | enzyme E1 catalytic subunit | |
| Q14839_C1827 | CHD4 Chromodomain- | 2939 |
| | helicase-DNA-binding protein | |
| | 4 | |
| Q9Y2D5_C205 | AKAP2 A-kinase anchor | 2940 |
| | protein 2 | |
| Q9UQ35_C956 | SRRM2 Serine/arginine | 2941 |
| | repetitive matrix protein 2 | |
| O60711_C358 | LPXN Leupaxin | 2942 |
| Q00013_C454 | MPP1 55 kDa erythrocyte | 2943 |
| | membrane protein | |
| Q6P1L8_C57 | MRPL14 39S ribosomal | 2944 |
| | protein L14, mitochondrial | |
| Q92973_C620 | TNPO1 Transportin-1 | 2945 |
| P42575_C320 | CASP2 Caspase-2 | 2946 |
| P35520_C431 | CBS Cystathionine beta- | 2947 |
| | synthase | |
| O95425_C1237 | SV1L Supervillin | 2948 |
| Q9Y305_C299 | ACOT9 Acyl-coenzyme A | 2949 |
| | thioesterase 9, mitochondrial | |
| P32321_C83 | DCTD Deoxycytidylate | 2950 |
| | deaminase | |
| P61158_C189 | ACTR3 Actin-related protein 3 | 2951 |
| P11413_C158 | G6PD Glucose-6-phosphate 1- | 2952 |
| | dehydrogenase | |
| P04181_C93 | OAT Ornithine | 2953 |
| | aminotransferase, | |
| | mitochondrial | |
| P15880_C182 | RPS2 40S ribosomal protein | 2954 |
| | S2 | |
| P01871_C88 | IGHM Ig mu chain C region | 2955 |
| P50991_C120 | CCT4 T-complex protein 1 | 2956 |
| | subunit delta | |
| P57678_C210 | GEMIN4 Gem-associated | 2957 |
| | protein 4 | |
| O94925_C287 | GLS Glutaminase kidney | 2958 |
| | isoform, mitochondrial | |
| Q8N3D4_C1364 | EHBP1L1 EH domain-binding | 2959 |
| | protein 1-like protein 1 | |
| Q8IUF8_C19 | MINA MYC-induced nuclear | 2960 |
| | antigen | |
| Q9NXH9_C376 | TRMT1 tRNA (guanine(26)- | 2961 |
| | N(2))-dimethyltransferase | |
| P00505_C382 | GOT2 Aspartate | 2962 |
| | aminotransferase, | |
| | mitochondrial | |
| A0JLT2_C62 | MED19 Mediator of RNA | 2963 |
| | polymerase II transcription | |
| | subunit | |
| O15382_C135 | BCAT2 Branched-chain- | 2964 |
| | amino-acid aminotransferase, | |
| | mitochondrial | |
| P52789_C606 | HK2 Hexokinase-2 | 2965 |
| Q9Y3C8_C116 | UFC1 Ubiquitin-fold modifier- | 2966 |
| | conjugating enzyme 1 | |
| Q13439_C1269 | GOLGA4 Golgin subfamily A | 2967 |
| | member 4 | |
| P63279_C43 | UBE2I SUMO-conjugating | 2968 |
| | enzyme UBC9 | |
| P60900_C47 | PSMA6 Proteasome subunit | 2969 |
| | alpha type-6 | |
| Q9H0L4_C222 | CSTF2T Cleavage stimulation | 2970 |
| | factor subunit 2 tau variant | |
| Q86UX7_C128 | FERMT3 Fermitin family | 2971 |
| | homolog 3 | |
| Q15003_C714 | NCAPH Condensin complex | 2972 |
| | subunit 2 | |
| O60684_C253 | KPNA6 Importin subunit | 2973 |
| | alpha-7 | |
| O75643_C1580 | SNRNP200 U5 small nuclear | 2974 |
| | ribonucleoprotein 200 kDa | |
| | helicas | |
| O43765_C129 | SGTA Small glutamine-rich | 2975 |
| | tetratricopeptide repeat- | |
| | containing, alpha | |
| Q9GZV5_C363 | WWTR1 WW domain- | 2976 |
| | containing transcription | |
| | regulator protein 1 | |
| P27816_C654 | MAP4 Microtubule-associated | 2977 |
| | protein 4 | |
| Q14847_C53 | LASP1 LIM and SH3 domain | 2978 |
| | protein 1 | |
| O15371_C195 | EIF3D Eukaryotic translation | 2979 |
| | initiation factor 3 subunit | |
| P10768_C181 | ESD S-formylglutathione | 2980 |
| | hydrolase | |
| P52895_C242 | AKR1C2 Aldo-keto reductase | 2981 |
| | family 1 member C2 | |
| Q9UBE0_C303 | SAE1 SUMO-activating | 2982 |
| | enzyme subunit 1 | |
| P29590_C204 | PML Protein PML | 2983 |
| O15231_C262 | ZNF185 Zinc finger protein | 2984 |
| | 185 | |
| O75251_C183 | NDUFS7 NADH | 2985 |
| | dehydrogenase | |
| Q01082_C1900 | SPTBN1 Spectrin beta chain, | 2986 |
| | non-erythrocytic 1 | |
| Q9UHR5_C127 | SAP30BP SAP30-binding | 2987 |
| | protein | |
| Q9NR56_C43 | MBNL1 Muscleblind-like | 2988 |
| | protein 1 | |
| Q9P2E9_C892 | RRBP1 Ribosome-binding | 2989 |
| | protein 1 | |
| Q9P2E9_C933 | RRBP1 Ribosome-binding | 2990 |
| | protein 1 | |
| Q9P2E9_C1057 | RRBP1 Ribosome-binding | 2991 |
| | protein 1 | |
| P13640_C38 | MT1G Metallothionein-1G | 2992 |
| Q9NSE4_C311 | IARS2 Isoleucine--tRNA | 2993 |
| | ligase, mitochondrial | |
| Q9Y2X7_C576 | GIT1 ARF GTPase-activating | 2994 |
| | protein GIT1 | |
| Q9H840_C44 | GEMIN7 Gem-associated | 2995 |
| | protein 7 | |
| P14678_C45 | SNRPB Small nuclear | 2996 |
| | ribonucleoprotein-associated | |
| | protein | |
| P28340_C428 | POLD1 DNA polymerase delta | 2997 |
| | catalytic subunit | |
| P28347_C53 | TEAD1 Transcriptional | 2998 |
| | enhancer factor TEF-1 | |
| P32780_C246 | GTF2H1 General transcription | 2999 |
| | factor IIH subunit 1 | |
| Q86VP6_C71 | CAND1 Cullin-associated | 3000 |
| | NEDD8-dissociated protein 1 | |
| Q92597_C394 | NDRG1 Protein NDRG1 | 3001 |
| Q8IW35_C484 | CEP97 Centrosomal protein of | 3002 |
| | 97 kDa | |
| Q96JB5_C216 | CDK5RAP3 CDK5 regulatory | 3003 |
| | subunit-associated protein 3 | |
| Q96T51_C320 | RUFY1 RUN and FYVE | 3004 |
| | domain-containing protein 1 | |
| Q13503_C29 | MED21 Mediator of RNA | 3005 |
| | polymerase II transcription | |
| | subunit | |
| P49721_C46 | PSMB2 Proteasome subunit | 3006 |
| | beta type-2 | |
| O75376_C2056 | NCOR1 Nuclear receptor | 3007 |
| | corepressor 1 | |
| Q86UP2_C1105 | KTN1 Kinectin | 3008 |
| Q8TB45_C247 | DEPTOR DEP domain- | 3009 |
| | containing mTOR-interacting | |
| | protein | |
| P41252_C87 | IARS Isoleucine--tRNA ligase, | 3010 |
| | cytoplasmic | |
| P41252_C120 | IARS Isoleucine--tRNA ligase, | 3011 |
| | cytoplasmic | |
| P41252_C433 | IARS Isoleucine--tRNA ligase, | 3012 |
| | cytoplasmic | |
| Q06203_C496 | PPAT | 3013 |
| | Amidophosphoribosyltransferase | |
| Q15437_C767 | SEC23B Protein transport | 3014 |
| | protein Sec23B | |
| Q9NQW6_C71 | ANLN Actin-binding protein | 3015 |
| | anillin | |
| Q9UBF6_C61 | RNF7 RING-box protein 2 | 3016 |
| P51649_C110 | ALDH5A1 Succinate- | 3017 |
| | semialdehyde dehydrogenase, | |
| | mitochondrial | |
| I3L420_C80 | LSM14A Protein LSM14 | 3018 |
| | homolog A | |
| Q13263_C88 | TRIM28 Transcription | 3019 |
| | intermediary factor 1-beta | |
| Q5VTU8_C19 | ATP5EP2 ATP synthase | 3020 |
| | subunit epsilon-like protein, | |
| | mitochondrial | |
| P06733_C337 | ENO1 Alpha-enolase | 3021 |
| P08559_C94 | PDHA1 Pyruvate | 3022 |
| | dehydrogenase E1 component | |
| | subunit alpha, | |
| Q14166_C642 | TTLL12 Tubulin--tyrosine | 3023 |
| | ligase-like protein 12 | |
| Q9BW92_C506 | TARS2 Threonine--tRNA | 3024 |
| | ligase, mitochondrial | |
| Q12824_C223 | SMARCB1 SWI/SNF-related | 3025 |
| | matrix-associated actin- | |
| | dependent | |
| O00410_C733 | IPO5 Importin-5 | 3026 |
| Q9BXV9_C21 | C14orf142 Uncharacterized | 3027 |
| | protein C14orf142 | |
| Q53GG5_C77 | PDLIM3 PDZ and LIM | 3028 |
| | domain protein 3 | |
| P36776_C858 | LONP1 Lon protease homolog, | 3029 |
| | mitochondrial | |
| Q16531_C652 | DDB1 DNA damage-binding | 3030 |
| | protein 1 | |
| Q96PZ0_C38 | PUS7 Pseudouridylate | 3031 |
| | synthase 7 homolog | |
| Q9HBM6_C121 | TAF9B Transcription initiation | 3032 |
| | factor TFIID subunit 9B | |
| A0AVT1_C625 | UBA6 Ubiquitin-like modifier- | 3033 |
| | activating enzyme 6 | |
| P53384_C31 | NUBP1 Cytosolic Fe—S cluster | 3034 |
| | assembly factor NUBP1 | |
| Q8TBE9_C242 | NANP N-acylneuraminate-9- | 3035 |
| | phosphatase | |
| P10644_C362 | PRKAR1A cAMP-dependent | 3036 |
| | protein kinase type I-alpha | |
| | regulatory subunit alpha | |
| P49790_C1065 | NUP153 Nuclear pore | 3037 |
| | complex protein Nup153 | |
| Q00610_C617 | CLTC Clathrin heavy chain 1 | 3038 |
| Q00610_C753 | CLTC Clathrin heavy chain 1 | 3039 |
| O00506_C357 | STK25 Serine/threonine- | 3040 |
| | protein kinase 25 | |
| Q6SJ93_C523 | FAM111B Protein FAM111B | 3041 |
| Q01581_C86 | HMGCS1 | 3042 |
| | Hydroxymethylglutaryl-CoA | |
| | synthase, cytoplasmic | |
| P35658_C917 | NUP214 Nuclear pore | 3043 |
| | complex protein Nup214 | |
| P46013_C958 | MKI67 Antigen KI-67 | 3044 |
| Q14005_C975 | IL16 Pro-interleukin-16 | 3045 |
| P40937_C73 | RFC5 Replication factor C | 3046 |
| | subunit 5 | |
| Q14653_C371 | IRF3 Interferon regulatory | 3047 |
| | factor 3 | |
| P07900_C420 | HSP90AA1 Heat shock protein | 3048 |
| | HSP 90-alpha | |
| P21333_C649 | FLNA Filamin-A | 3049 |
| P21333_C1260 | FLNA Filamin-A | 3050 |
| P21333_C2160 | FLNA Filamin-A | 3051 |
| Q7Z3D6_C265 | C14orf159 UPF0317 protein | 3052 |
| | C14orf159, mitochondrial | |
| O00264_C129 | PGRMC1 Membrane- | 3053 |
| | associated progesterone | |
| | receptor component 1 | |
| Q15345_C123 | LRRC41 Leucine-rich repeat- | 3054 |
| | containing protein 41 | |
| P43490_C397 | NAMPT Nicotinamide | 3055 |
| | phosphoribosyltransferase | |
| O43504_C66 | HBXIP Hepatitis B virus X- | 3056 |
| | interacting protein | |
| P48307_C130 | TFPI2 Tissue factor pathway | 3057 |
| | inhibitor 2 | |
| P18074_C663 | ERCC2 TFHH basal | 3058 |
| | transcription factor complex | |
| | helicase | |
| Q9NV35_C23 | NUDT15 Probable 8-oxo- | 3059 |
| | dGTP diphosphatase NUDT15 | |
| Q12888_C896 | TP53BP1 Tumor suppressor | 3060 |
| | p53-binding protein 1 | |
| Q8TAC2_C168 | JOSD2 Josephin-2 | 3061 |
| Q6P1L8_C90 | MRPL14 39S ribosomal | 3062 |
| | protein L14, mitochondrial | |
| Q92576_C441 | PHF3 PHD finger protein 3 | 3063 |
| P63000_C105 | RAC1 Ras-related C3 | 3064 |
| | botulinum toxin substrate 1 | |
| O94776_C261 | MTA2 Metastasis-associated | 3065 |
| | protein MTA2 | |
| Q9P0K7_C131 | RAI14 Ankycorbin | 3066 |
| Q92747_C162 | ARPC1A Actin-related protein | 3067 |
| | 2/3 complex subunit 1A | |
| Q8NE71_C741 | ABCF1 ATP-binding cassette | 3068 |
| | sub-family F member 1 | |
| P58546_C45 | MTPN Myotrophin | 3069 |
| Q10570_C1044 | CPSF1 Cleavage and | 3070 |
| | polyadenylation specificity | |
| | factor subunit 1 | |
| Q15021_C320 | NCAPD2 Condensin complex | 3071 |
| | subunit 1 | |
| Q6P1N0_C252 | CC2D1A Coiled-coil and C2 | 3072 |
| | domain-containing protein 1A | |
| O43818_C399 | RRP9 U3 small nucleolar | 3073 |
| | RNA-interacting protein 2 | |
| Q92556_C726 | ELMO1 Engulfment and cell | 3074 |
| | motility protein 1 | |
| Q9NSP4_C110 | CENPM Centromere protein | 3075 |
| | M | |
| P22234_C151 | PAICS Multifunctional protein | 3076 |
| | ADE2 | |
| Q96RN5_C698 | MED15 Mediator of RNA | 3077 |
| | polymerase II transcription | |
| | subunit | |
| Q8IWZ3_C181 | ANKHD1 Ankyrin repeat and | 3078 |
| | KH domain-containing protein | |
| | 1 | |
| H3BN98_C109 | Uncharacterized protein | 3079 |
| Q14683_C1115 | SMC1A Structural | 3080 |
| | maintenance of chromosomes | |
| | protein 1A | |
| P33764_C99 | S100A3 Protein S100-A3 | 3081 |
| Q8NF50_C143 | DOCK8 Dedicator of | 3082 |
| | cytokinesis protein 8 | |
| Q9NZT2_C87 | OGFR Opioid growth factor | 3083 |
| | receptor | |
| Q13620_C248 | CUL4B Cullin-4B | 3084 |
| P00505_C187 | GOT2 Aspartate | 3085 |
| | aminotransferase, | |
| | mitochondrial | |
| Q9Y262_C417 | EIF3L Eukaryotic translation | 3086 |
| | initiation factor 3 subunit | |
| O75521_C282 | ECI2 Enoyl-CoA delta | 3087 |
| | isomerase 2, mitochondrial | |
| Q01469_C120 | FABP5 Fatty acid-binding | 3088 |
| | protein, epidermal | |
| O14965_C33 | AURKA Aurora kinase A | 3089 |
| P24844_C109 | MYL9 Myosin regulatory light | 3090 |
| | polypeptide 9 | |
| Q9ULT8_C2415 | HECTD1 E3 ubiquitin-protein | 3091 |
| | ligase HECTD1 | |
| P81877_C82 | SSBP2 Single-stranded DNA- | 3092 |
| | binding protein 2 | |
| Q9UJX3_C329 | ANAPC7 Anaphase-promoting | 3093 |
| | complex subunit 7 | |
| Q9BW19_C663 | KIFC1 Kinesin-like protein | 3094 |
| | KIFC1 | |
| P51553_C333 | IDH3G Isocitrate | 3095 |
| | dehydrogenase | |
| P32320_C53 | CDA Cytidine deaminase | 3096 |
| Q02750_C376 | MAP2K1 Dual specificity | 3097 |
| | mitogen-activated protein | |
| | kinase | |
| O94829_C163 | IPO13 Importin-13 | 3098 |
| Q9UNH7_C149 | SNX6 Sorting nexin-6 | 3099 |
| Q9UQ80_C149 | PA2G4 Proliferation- | 3100 |
| | associated protein 2G4 | |
| P13674_C503 | P4HA1 Prolyl 4-hydroxylase | 3101 |
| | subunit alpha-1 | |
| O95239_C153 | KIF4A Chromosome- | 3102 |
| | associated kinesin KIF4A | |
| P08134_C20 | RHOC Rho-related GTP- | 3103 |
| | binding protein RhoC | |
| P15121_C45 | AKR1B1 Aldose reductase | 3104 |
| P42704_C208 | LRPPRC Leucine-rich PPR | 3105 |
| | motif-containing protein, | |
| | mitochondrial | |
| Q9BYV9_C370 | BACH2 Transcription | 3106 |
| | regulator protein BACH2 | |
| | SPACPFDK | |
| | R.SPAC*PFDK.G | |
| Q9P0V9_C22 | SEPT10 Septin-10 | 3107 |
| P51570_C203 | GALK1 Galactokinase | 3108 |
| Q7Z5L9_C37 | IRF2BP2 Interferon regulatory | 3109 |
| | factor 2-binding protein 2 | |
| Q86VP6_C1007 | CAND1 Cullin-associated | 3110 |
| | NEDD8-dissociated protein 1 | |
| Q6KB66_C244 | KRT80 Keratin, type II | 3111 |
| | cytoskeletal 80 | |
| P17980_C240 | PSMC3 26S protease | 3112 |
| | regulatory subunit 6A | |
| P13797_C566 | PLS3 Plastin-3 | 3113 |
| Q15599_C271 | SLC9A3R2 Na(+)/H(+) | 3114 |
| | exchange regulatory cofactor | |
| | NHE-RF2 | |
| P41134_C45 | ID1 DNA-binding protein | 3115 |
| | inhibitor ID-1 | |
| Q06210_C264 | GFPT1 Glucosamine-- | 3116 |
| | fructose-6-phosphate | |
| | aminotransferase | |
| P12694_C178 | BCKDHA 2-oxoisovalerate | 3117 |
| | dehydrogenase subunit alpha, | |
| | mitochondrial | |
| Q5XKP0_C60 | QIL1 Protein QIL1 | 3118 |
| Q9UMS4_C298 | PRPF19 Pre-mRNA- | 3119 |
| | processing factor 19 | |
| Q9H2U2_C44 | PPA2 Inorganic | 3120 |
| | pyrophosphatase 2, | |
| | mitochondrial | |
| Q9H2U2_C283 | PPA2 Inorganic | 3121 |
| | pyrophosphatase 2, | |
| | mitochondrial | |
| Q68CZ2_C615 | TNS3 Tensin-3 | 3122 |
| Q99933_C272 | BAG1 BAG family molecular | 3123 |
| | chaperone regulator 1 | |
| Q86U42_C205 | PABPN1 Polyadenylate- | 3124 |
| | binding protein 2 | |
| Q14141_C42 | SEPT6 Septin-6 | 3125 |
| Q9H4B0_C390 | OSGEPL1 Probable tRNA | 3126 |
| | threonylcarbamoyladenosine | |
| | biosynthesis protein OSGEPL1 | |
| P13796_C140 | LCP1 Plastin-2 | 3127 |
| Q06330_C397 | RBPJ Recombining binding | 3128 |
| | protein suppressor of hairless | |
| Q6NVY1_C45 | HIBCH 3-hydroxyisobutyryl- | 3129 |
| | CoA hydrolase, mitochondrial | |
| Q9BYB4_C175 | GNB1L Guanine nucleotide- | 3130 |
| | binding protein subunit beta- | |
| | like protein 1 | |
| P43681_C225 | CHRNA4 Neuronal | 3131 |
| | acetylcholine receptor subunit | |
| | alpha-4 | |
| Q9Y490_C2408 | TLN1 Talin-1 | 3132 |
| P39748_C163 | FEN1 Flap endonuclease 1 | 3133 |
| P49137_C224 | MAPKAPK2 MAP kinase- | 3134 |
| | activated protein kinase 2 | |
| O96013_C276 | PAK4 Serine/threonine-protein | 3135 |
| | kinase PAK 4 | |
| P49748_C477 | ACADVL Very long-chain | 3136 |
| | specific acyl-CoA | |
| | dehydrogenase, m | |
| Q7Z4W1_C244 | DCXR Lxylulose reductase | 3137 |
| P33992_C355 | MCM5 DNA replication | 3138 |
| | licensing factor MCM5 | |
| A6NHR9_C59 | SMCHD1 Structural | 3139 |
| | maintenance of chromosomes | |
| | flexible hinge domain | |
| | containing 1 | |
| O15460_C529 | P4HA2 Prolyl 4-hydroxylase | 3140 |
| | subunit alpha-2 | |
| Q12824_C350 | SMARCB1 SWI/SNF-related | 3141 |
| | matrix-associated actin- | |
| | dependent | |
| O00410_C944 | IPOS Importin-5 | 3142 |
| Q96CP2_C64 | FLYWCH2 FLYWCH family | 3143 |
| | member 2 | |
| Q15080_C84 | NCF4 Neutrophil cytosol | 3144 |
| | factor 4 | |
| Q02241_C483 | KIF23 Kinesin-like protein | 3145 |
| | KIF23 | |
| Q9NSV4_C102 | DIAPH3 Protein diaphanous | 3146 |
| | homolog 3 | |
| Q96N67_C1944 | DOCK7 Dedicator of | 3147 |
| | cytokinesis protein 7 | |
| P16885_C1200 | PLCG2 1-phosphatidylinositol | 3148 |
| | 4,5-bisphosphate | |
| | phosphodiesterase gamma-2 | |
| Q15366_C301 | PCBP2 Poly(rC)-binding | 3149 |
| | protein 2 | |
| Q92598_C290 | HSPH1 Heat shock protein 105 | 3150 |
| | kDa | |
| P53384_C277 | NUBP1 Cytosolic Fe—S cluster | 3151 |
| | assembly factor NUBP1 | |
| Q15181_C254 | PPA1 Inorganic | 3152 |
| | pyrophosphatase | |
| Q7Z5K2_C344 | WAPAL Wings apart-like | 3153 |
| | protein homolog | |
| Q7Z5K2_C906 | WAPAL Wings apart-like | 3154 |
| | protein homolog | |
| Q8NFC6_C285 | BOD1L1 Biorientation of | 3155 |
| | chromosomes in cell division | |
| | protein | |
| P53634_C258 | CTSC Dipeptidyl peptidase 1 | 3156 |
| Q96G25_C31 | MED8 Mediator of RNA | 3157 |
| | polymerase II transcription | |
| | subunit | |
| P10644_C39 | PRKAR1A cAMP-dependent | 3158 |
| | protein kinase type I-alpha | |
| | regulat | |
| O00273_C38 | DFFA DNA fragmentation | 3159 |
| | factor subunit alpha | |
| P49792_C2577 | RANBP2 E3 SUMO-protein | 3160 |
| | ligase RanBP2 | |
| P49792_C2791 | RANBP2 E3 SUMO-protein | 3161 |
| | ligase RanBP2 | |
| Q93009_C961 | USP7 Ubiquitin carboxyl- | 3162 |
| | terminal hydrolase 7 | |
| Q00610_C491 | CLTC Clathrin heavy chain 1 | 3163 |
| O60547_C92 | GMDS GDP-mannose 4,6 | 3164 |
| | dehydratase | |
| Q9H0P0_C73 | NT5C3 Cytosolic 5- | 3165 |
| | nucleotidase 3 | |
| O75427_C105 | LRCH4 Leucine-rich repeat | 3166 |
| | and calponin homology | |
| | domain-containing 4 | |
| Q4G0N4_C58 | NADKD1 NAD kinase | 3167 |
| | domain-containing protein 1 | |
| Q9Y4P8_C393 | WIPI2 WD repeat domain | 3168 |
| | phosphoinositide-interacting | |
| | protein | |
| P27695_C65 | APEX1 DNA-(apurinic or | 3169 |
| | apyrimidinic site) lyase | |
| Q15004_C99 | KIAA0101 PCNA-associated | 3170 |
| | factor | |
| P17858_C114 | PFKL 6-phosphofructokinase, | 3171 |
| | liver type | |
| P17858_C334 | PFKL 6-phosphofructokinase, | 3172 |
| | liver type | |
| Q96PK6_C90 | RBM14 RNA-binding protein | 3173 |
| | 14 | |
| Q09028_C167 | RBBP4 Histone-binding | 3174 |
| | protein RBBP4 | |
| Q8TC07_C24 | TBC1D15 TBC1 domain | 3175 |
| | family member 15 | |
| Q7Z6Z7_C2721 | HUWE1 E3 ubiquitin-protein | 3176 |
| | ligase HUWE1 | |
| Q9H6S3_C369 | EPS8L2 Epidermal growth | 3177 |
| | factor receptor kinase substrate | |
| Q9Y281_C80 | CFL2 Cofilin-2 | 3178 |
| Q96IZ6_C171 | METTL2A Methyltransferase- | 3179 |
| | like protein 2A | |
| Q96EM0_C39 | L3HYPDH Trans-L-3- | 3180 |
| | hydroxyproline dehydratase | |
| Q92616_C2255 | GCN1L1 Translational | 3181 |
| | activator GCN1 | |
| P43490_C401 | NAMPT Nicotinamide | 3182 |
| | phosphoribosyltransferase | |
| P22087_C268 | FBL rRNA 2-O- | 3183 |
| | methyltransferase fibrillarin | |
| Q92503_C644 | SEC14L1 SEc14-like protein | 3184 |
| | 1 | |
| Q9UI10_C69 | EIF2B4 Translation initiation | 3185 |
| | factor eIF-2B subunit delta | |
| P49327_C161 | FASN Fatty acid synthase | 3186 |
| P49327_C1141 | FASN Fatty acid synthase | 3187 |
| P49327_C1227 | FASN Fatty acid synthase | 3188 |
| Q9ULZ3_C173 | PYCARD Apoptosis- | 3189 |
| | associated speck-like protein | |
| | containing | |
| Q8WUI4_C904 | HDAC7 Histone deacetylase 7 | 3190 |
| Q7L2J0_C324 | MEPCE 7SK snRNA | 3191 |
| | methylphosphate capping | |
| | enzyme | |
| Q9BUK6_C46 | MSTO1 Protein misato | 3192 |
| | homolog 1 | |
| P54577_C424 | YARS Tyrosine--tRNA ligase, | 3193 |
| | cytoplasmic | |
| Q8WU90_C105 | ZC3H15 Zinc finger CCCH | 3194 |
| | domain-containing protein 15 | |
| Q9Y305_C194 | ACOT9 Acyl-coenzyme A | 3195 |
| | thioesterase 9, mitochondrial | |
| Q15149_C1098 | PLEC Plectin | 3196 |
| Q14669_C535 | TRIP12 E3 ubiquitin-protein | 3197 |
| | ligase TRIP12 | |
| Q9BTT0_C123 | ANP32E Acidic leucine-rich | 3198 |
| | nuclear phosphoprotein 32 | |
| | family member E | |
| Q92989_C338 | CLP1 Polyribonucleotide 5- | 3199 |
| | hydroxyl-kinase Clp1 | |
| P06132_C59 | UROD Uroporphyrinogen | 3200 |
| | decarboxylase | |
| Q96EY7_C139 | PTCD3 Pentatricopeptide | 3201 |
| | repeat-containing protein 3, | |
| | mitochondrial | |
| P78527_C90 | PRKDC DNA-dependent | 3202 |
| | protein kinase catalytic subunit | |
| P78527_C1312 | PRKDC DNA-dependent | 3203 |
| | protein kinase catalytic subunit | |
| P78527_C1767 | PRKDC DNA-dependent | 3204 |
| | protein kinase catalytic subunit | |
| Q92747_C279 | ARPC1A Actin-related protein | 3205 |
| | 2/3 complex subunit 1A | |
| Q14671_C234 | PUM1 Pumilio homolog 1 | 3206 |
| O60216_C585 | RAD21 Double-strand-break | 3207 |
| | repair protein rad21 homolog | |
| Q5VZF2_C19 | MBNL2 Muscleblind-like | 3208 |
| | protein 2 | |
| Q9UEW8_C525 | STK39 STE20/SPS1-related | 3209 |
| | proline-alanine-rich protein | |
| | kinase | |
| O00232_C255 | PSMD12 26S proteasome non- | 3210 |
| | ATPase regulatory subunit 12 | |
| O00233_C81 | PSMD9 26S proteasome non- | 3211 |
| | ATPase regulatory subunit 9 | |
| Q5GLZ8_C392 | HERC4 Probable E3 ubiquitin- | 3212 |
| | protein ligase HERC4 | |
| O14579_C212 | COPE Coatomer subunit | 3213 |
| | epsilon | |
| Q7Z4G1_C35 | COMMD6 COMM domain- | 3214 |
| | containing protein 6 | |
| P17812_C218 | CTPS1 CTP synthase 1 | 3215 |
| O95394_C200 | PGM3 | 3216 |
| | Phosphoacetylglucosamine | |
| | mutase | |
| Q7LBC6_C1357 | KDM3B Lysine-specific | 3217 |
| | demethylase 3B | |
| Q99496_C72 | RNF2 E3 ubiquitin-protein | 3218 |
| | ligase RING2 | |
| Q9UNW1_C232 | MINPP1 Multiple inositol | 3219 |
| | polyphosphate phosphatase 1 | |
| P50453_C259 | SERPINB9 Serpin B9 | 3220 |
| Q9NZT2_C417 | OGFR Opioid growth factor | 3221 |
| | receptor | |
| O95573_C450 | ACSL3 Long-chain-fatty-acid-- | 3222 |
| | CoA ligase 3 | |
| O60841_C720 | EIF5B Eukaryotic translation | 3223 |
| | initiation factor 5B | |
| P29317_C612 | EPHA2 Ephrin type-A | 3224 |
| | receptor 2 | |
| O14561_C140 | NDUFAB1 Acyl carrier | 3225 |
| | protein, mitochondrial | |
| Q9NXH9_C639 | TRMT1 tRNA (guanine(26)- | 3226 |
| | N(2))-dimethyltransferase | |
| Q9H6Y2_C306 | WDR55 WD repeat-containing | 3227 |
| | protein 55 | |
| A0JLT2_C163 | MED19 Mediator of RNA | 3228 |
| | polymerase II transcription | |
| | subunit | |
| Q10567_C565 | AP1B1 AP-1 complex subunit | 3229 |
| | beta-1 | |
| P08243_C115 | ASNS Asparagine synthetase | 3230 |
| P08243_C158 | ASNS Asparagine synthetase | 3231 |
| P46736_C273 | BRCC3 Lys-63-specific | 3232 |
| | deubiquitinase BRCC36 | |
| Q01469_C67 | FABP5 Fatty acid-binding | 3233 |
| | protein, epidermal | |
| O43175_C116 | PHGDH D-3- | 3234 |
| | phosphoglycerate | |
| | dehydrogenase | |
| O14818_C91 | PSMA7 Proteasome subunit | 3235 |
| | alpha type-7 | |
| Q9BRA2_C110 | TXNDC17 Thioredoxin | 3236 |
| | domain-containing protein 17 | |
| P01892_C363 | HLA-A HLA class I histocompatibility | 3237 |
| | antigen, A-2 alpha | |
| P84085_C159 | ARF5 ADP-ribosylation factor | 3238 |
| | 5 | |
| P62879_C204 | GNB2 Guanine nucleotide- | 3239 |
| | binding protein G(I)/G(S)/G(T) | |
| Q9C0C9_C244 | UBE2O Ubiquitin-conjugating | 3240 |
| | enzyme E2 O | |
| Q9C0C9_C598 | UBE2O Ubiquitin-conjugating | 3241 |
| | enzyme E2 O | |
| Q14204_C3573 | DYNC1H1 Cytoplasmic | 3242 |
| | dynein 1 heavy chain 1 | |
| O60684_C238 | KPNA6 Importin subunit | 3243 |
| | alpha-7 | |
| P20073_C413 | ANXA7 Annexin A7 | 3244 |
| O75643_C1127 | SNRNP200 U5 small nuclear | 3245 |
| | ribonucleoprotein 200 kDa | |
| | helicase | |
| P32320_C31 | CDA Cytidine deaminase | 3246 |
| P11586_C236 | MTHFD1 C-1-tetrahydrofolate | 3247 |
| | synthase, cytoplasmic | |
| H3BN57_C113 | BLOC1S5-TXNDC5 Protein | 3248 |
| | BLOC1S5-TXNDC5 | |
| Q53HC9_C95 | TSSC1 Protein TSSC1 | 3249 |
| P27816_C67 | MAP4 Microtubule-associated | 3250 |
| | protein 4 | |
| P84090_C33 | ERH Enhancer of rudimentary | 3251 |
| | homolog | |
| O00487_C299 | PSMD14 26S proteasome non- | 3252 |
| | ATPase regulatory subunit 14 | |
| Q8N8R5_C43 | C2orf69 UPF0565 protein | 3253 |
| | C2orf69 | |
| P52948_C1027 | NUP98 Nuclear pore complex | 3254 |
| | protein Nup98-Nup96 | |
| P52948_C1068 | NUP98 Nuclear pore complex | 3255 |
| | protein Nup98-Nup96 | |
| Q4G0P3_C1853 | HYDIN Hydrocephalus- | 3256 |
| | inducing protein homolog | |
| Q08J23_C502 | NSUN2 tRNA (cytosine(34)- | 3257 |
| | C(5))-methyltransferase | |
| O15231_C542 | ZNF185 Zinc finger protein | 3258 |
| | 185 | |
| P21291_C122 | CSRP1 Cysteine and glycine- | 3259 |
| | rich protein 1 | |
| O43447_C122 | PPIH Peptidyl-prolyl cis-trans | 3260 |
| | isomerase H | |
| P08237_C170 | PFKM 6-phosphofructokinase, | 3261 |
| | muscle type | |
| Q1KMD3_C602 | HNRNPUL2 Heterogeneous | 3262 |
| | nuclear ribonucleoprotein U- | |
| | like protein 2 | |
| P51991_C94 | HNRNPA3 Heterogeneous | 3263 |
| | nuclear ribonucleoprotein A3 | |
| P35237_C36 | SERPINB6 Serpin B6 | 3264 |
| Q96FJ2_C24 | DYNLL2 Dynein light chain 2, | 3265 |
| | cytoplasmic | |
| Q9BTZ2_C209 | DHRS4 | 3266 |
| | Dehydrogenase/reductase SDR | |
| | family member 4 | |
| Q9UMS4_C230 | PRPF19 Pre-mRNA- | 3267 |
| | processing factor 19 | |
| Q9Y6A5_C459 | TACC3 Transforming acidic | 3268 |
| | coiled-coil-containing protein | |
| Q86TI0_C604 | TBC1D1 TBC1 domain family | 3269 |
| | member 1 | |
| Q9H0W9_C226 | C11orf54 Ester hydrolase | 3270 |
| | C11orf54 | |
| P18031_C121 | PTPN1 Tyrosine-protein | 3271 |
| | phosphatase non-receptor type | |
| | 1 | |
| O60343_C1286 | TBC1D4 TBC1 domain family | 3272 |
| | member 4 | |
| O60759_C210 | CYTIP Cytohesin-interacting | 3273 |
| | protein | |
| P10398_C192 | ARAF Serine/threonine- | 3274 |
| | protein kinase A-Raf | |
| Q71SY5_C111 | MED25 Mediator of RNA | 3275 |
| | polymerase II transcription | |
| | subunit | |
| Q9Y490_C1392 | TLN1 Talin-1 | 3276 |
| P43246_C873 | MSH2 DNA mismatch repair | 3277 |
| | protein Msh2 | |
| P23381_C305 | WARS Tryptophan--tRNA | 3278 |
| | ligase, cytoplasmic | |
| Q9NXV2_C28 | KCTD5 BTB/POZ domain- | 3279 |
| | containing protein KCTD5 | |
| P21399_C369 | ACO1 Cytoplasmic aconitate | 3280 |
| | hydratase | |
| Q06830_C52 | PRDX1 Peroxiredoxin-1 | 3281 |
| Q96D46_C20 | NMD3 60S ribosomal export | 3282 |
| | protein NMD3 | |
| Q9Y6C9_C79 | MTCH2 Mitochondrial carrier | 3283 |
| | homolog 2 | |
| O00429_C446 | DNM1L Dynamin-1-like | 3284 |
| | protein | |
| P50552_C64 | VASP Vasodilator-stimulated | 3285 |
| | phosphoprotein | |
| Q00796_C120 | SORD Sorbitol dehydrogenase | 3286 |
| P42126_C114 | ECI1 Enoyl-CoA delta | 3287 |
| | isomerase 1, mitochondrial | |
| P49368_C213 | CCT3 T-complex protein 1 | 3288 |
| | subunit gamma | |
| Q9NY27_C105 | PPP4R2 Serine/threonine- | 3289 |
| | protein phosphatase 4 | |
| | regulatory | |
| P49756_C83 | RBM25 RNA-binding protein | 3290 |
| | 25 | |
| F5H5P2_C231 | Uncharacterized protein | 3291 |
| Q14C86_C741 | GAPVD1 GTPase-activating | 3292 |
| | protein and VPS9 domain- | |
| | containing protein 1 | |
| Q969V6_C326 | MKL1 MKL/myocardin-like | 3293 |
| | protein 1 | |
| Q9P2N5_C21 | RBM27 RNA-binding protein | 3294 |
| | 27 | |
| P53396_C229 | ACLY ATP-citrate synthase | 3295 |
| Q8WVT3_C160 | TRAPPC12 Trafficking | 3296 |
| | protein particle complex | |
| | subunit 12 | |
| O43678_C24 | NDUFA2 NADH | 3297 |
| | dehydrogenase | |
| Q96IF1_C270 | AJUBA LIM domain- | 3298 |
| | containing protein ajuba | |
| Q14974_C158 | KPNB1 Importin subunit beta- | 3299 |
| | 1 | |
| P21266_C178 | GSTM3 Glutathione S- | 3300 |
| | transferase Mu 3 | |
| O00622_C322 | CYR61 Protein CYR61 | 3301 |
| Q96N67_C193 | DOCK7 Dedicator of | 3302 |
| | cytokinesis protein 7 | |
| Q15369_C74 | TCEB1 Transcription | 3303 |
| | elongation factor B | |
| | polypeptide 1 | |
| A6NDU8_C57 | C5orf51 UPF0600 protein | 3304 |
| | C5orf51 | |
| Q9P219_C1871 | CCDC88C Protein Daple | 3305 |
| Q09161_C73 | NCBP1 Nuclear cap-binding | 3306 |
| | protein subunit 1 | |
| Q69YN2_C141 | CWF19L1 CWF19-like protein | 3307 |
| | 1 | |
| Q70E73_C1045 | RAPH1 Ras-associated and | 3308 |
| | pleckstrin homology domains- | |
| | containing protein 1 | |
| Q93008_C1237 | USP9X Probable ubiquitin | 3309 |
| | carboxyl-terminal hydrolase | |
| | FAF | |
| Q9UQ13_C144 | SHOC2 Leucine-rich repeat | 3310 |
| | protein SHOC-2 | |
| Q9BXP5_C715 | SRRT Serrate RNA effector | 3311 |
| | molecule homolog | |
| Q96P65_C201 | QRFPR Pyroglutamylated | 3312 |
| | RFamide peptide receptor | |
| P46013_C261 | MKI67 Antigen KI-67 | 3313 |
| P17858_C630 | PFKL 6-phosphofructokinase, | 3314 |
| | liver type | |
| O75083_C285 | WDR1 WD repeat-containing | 3315 |
| | protein 1 | |
| O43252_C78 | PAPSS1 Bifunctional 3- | 3316 |
| | phosphoadenosine 5- | |
| | phosphosulfate | |
| Q6WCQ1_C724 | MPRIP Myosin phosphatase | 3317 |
| | Rho-interacting protein | |
| Q14008_C1360 | CKAP5 Cytoskeleton- | 3318 |
| | associated protein 5 | |
| P40939_C349 | HADHA Trifunctional enzyme | 3319 |
| | subunit alpha, mitochondrial | |
| P21333_C2293 | FLNA Filamin-A | 3320 |
| P30566_C483 | ADSL Adenylosuccinate lyase | 3321 |
| Q9Y285_C493 | FARSA Phenylalanine--tRNA | 3322 |
| | ligase alpha subunit | |
| Q06124_C318 | PTPN11 Tyrosine-protein | 3323 |
| | phosphatase non-receptor type | |
| | 11 | |
| Q96SZ5_C18 | ADO 2-aminoethanethiol | 3324 |
| | dioxygenase | |
| Q96CM8_C122 | ACSF2 Acyl-CoA synthetase | 3325 |
| | family member 2, | |
| | mitochondrial | |
| P46063_C606 | RECQL ATP-dependent DNA | 3326 |
| | helicase Q1 | |
| P53618_C248 | COPB1 Coatomer subunit beta | 3327 |
| P53618_C684 | COPB1 Coatomer subunit beta | 3328 |
| Q9UI10_C465 | EIF2B4 Translation initiation | 3329 |
| | factor eIF-2B subunit delta | |
| Q9UI10_C509 | EIF2B4 Translation initiation | 3330 |
| | factor eIF-2B subunit delta | |
| Q8WV28_C271 | BLNK B-cell linker protein | 3331 |
| P49327_C2273 | FASN Fatty acid synthase | 3332 |
| Q9UGV2_C359 | NDRG3 Protein NDRG3 | 3333 |
| Q99436_C87 | PSMB7 Proteasome subunit | 3334 |
| | beta type-7 | |
| Q86YS7_C867 | KIAA0528 Uncharacterized | 3335 |
| | protein KIAA0528 | |
| P48444_C286 | ARCN1 Coatomer subunit | 3336 |
| | delta | |
| Q86V48_C560 | LUZP1 Leucine zipper protein | 3337 |
| | 1 | |
| Q9UQ35_C1029 | SRRM2 Serine/arginine | 3338 |
| | repetitive matrix protein 2 | |
| Q9BSH5_C109 | HDHD3 Haloacid | 3339 |
| | dehalogenase-like hydrolase | |
| | domain-containing 3 | |
| Q92973_C790 | TNPO1 Transportin-1 | 3340 |
| Q8N3F8_C597 | MICALL1 MICAL-like | 3341 |
| | protein 1 | |
| O95425_C1949 | SVIL Supervillin | 3342 |
| Q8IVH2_C447 | FOXP4 Forkhead box protein | 3343 |
| | P4 | |
| Q15149_C965 | PLEC Plectin | 3344 |
| P25788_C42 | PSMA3 Proteasome subunit | 3345 |
| | alpha type-3 | |
| Q9HB40_C152 | SCPEP1 Retinoid-inducible | 3346 |
| | serine carboxypeptidase | |
| Q08945_C139 | SSRP1 FACT complex subunit | 3347 |
| | SSRP1 | |
| Q00577_C272 | PURA Transcriptional | 3348 |
| | activator protein Pur-alpha | |
| Q96EY5_C33 | FAM125A Multivesicular | 3349 |
| | body subunit 12A | |
| P13639_C536 | EEF2 Elongation factor 2 | 3350 |
| P28799_C178 | GRN Granulins | 3351 |
| Q14258_C475 | TRIM25 E3 ubiquitin/ISG15 | 3352 |
| | ligase TRIM25 | |
| O75694_C874 | NUP155 Nuclear pore | 3353 |
| | complex protein Nup155 | |
| P49189_C267 | ALDH9A1 4- | 3354 |
| | trimethylaminobutyraldehyde | |
| | dehydrogenase | |
| O43592_C522 | XPOT Exportin-T | 3355 |
| Q9NUQ3_C127 | TXLNG Gamma-taxilin | 3356 |
| O94760_C178 | DDAH1 N(G),N(G)- | 3357 |
| | dimethylarginine | |
| | dimethylaminohydrolase | |
| P61163_C222 | ACTR1A Alpha-centractin | 3358 |
| Q12905_C311 | ILF2 Interleukin enhancer- | 3359 |
| | binding factor 2 | |
| Q14814_C217 | MEF2D Myocyte-specific | 3360 |
| | enhancer factor 2D | |
| P50990_C430 | CCT8 T-complex protein 1 | 3361 |
| | subunit theta | |
| P49848_C644 | TAF6 Transcription initiation | 3362 |
| | factor TFIID subunit 6 | |
| O00541_C153 | PES1 Pescadillo homolog | 3363 |
| P17812_C30 | CTPS1 CTP synthase 1 | 3364 |
| Q9P287_C213 | BCCIP BRCA2 and | 3365 |
| | CDKN1A-interacting protein | |
| Q7LBC6_C1212 | KDM3B Lysine-specific | 3366 |
| | demethylase 3B | |
| Q9Y3P9_C155 | RABGAP1 Rab GTPase- | 3367 |
| | activating protein 1 | |
| Q99497_C53 | PARK7 Protein DJ-1 | 3368 |
| O95571_C98 | ETHE1 Protein ETHE1, | 3369 |
| | mitochondrial | |
| Q8WUM0_C530 | NUP133 Nuclear pore | 3370 |
| | complex protein Nup133 | |
| P11387_C630 | TOP1 DNA topoisomerase 1 | 3371 |
| P25098_C340 | ADRBK1 Beta-adrenergic | 3372 |
| | receptor kinase 1 | |
| Q15796_C70 | SMAD2 Mothers against | 3373 |
| | decapentaplegic homolog 2 | |
| Q8NF50_C170 | DOCK8 Dedicator of | 3374 |
| | cytokinesis protein 8 | |
| Q8NF50_C186 | DOCK8 Dedicator of | 3375 |
| | cytokinesis protein 8 | |
| Q8N5N7_C52 | MRPL50 39S ribosomal | 3376 |
| | protein L50, mitochondrial | |
| Q86UW9_C351 | DTX2 Probable E3 ubiquitin- | 3377 |
| | protein ligase DTX2 | |
| I3L3Q1_C657 | Uncharacterized protein | 3378 |
| Q96QA5_C174 | GSDMA Gasdermin-A | 3379 |
| Q9Y263_C605 | PLAA Phospholipase A-2- | 3380 |
| | activating protein | |
| O75521_C312 | ECI2 Enoyl-CoA delta | 3381 |
| | isomerase 2, mitochondrial | |
| P08243_C44 | ASNS Asparagine synthetase | 3382 |
| Q9BQS8_C293 | FYCO1 FYVE and coiled-coil | 3383 |
| | domain-containing protein 1 | |
| Q96QK1_C699 | VPS35 Vacuolar protein | 3384 |
| | sorting-associated protein 35 | |
| Q8NDI1_C849 | EHBP1 EH domain-binding | 3385 |
| | protein 1 | |
| P19367_C158 | HK1 Hexokinase-1 | 3386 |
| O14818_C63 | PSMA7 Proteasome subunit | 3387 |
| | alpha type-7 | |
| Q13439_C1085 | GOLGA4 Golgin subfamily A | 3388 |
| | member 4 | |
| P63279_C93 | UBE2I SUMO-conjugating | 3389 |
| | enzyme UBC9 | |
| Q15003_C114 | NCAPH Condensin complex | 3390 |
| | subunit 2 | |
| O75534_C730 | CSDE1 Cold shock domain- | 3391 |
| | containing protein E1 | |
| Q8WVB6_C373 | CHTF18 Chromosome | 3392 |
| | transmission fidelity protein 18 | |
| | homolog | |
| Q14204_C3033 | DYNC1H1 Cytoplasmic | 3393 |
| | dynein 1 heavy chain 1 | |
| Q9UN37_C233 | VPS4A Vacuolar protein | 3394 |
| | sorting-associated protein 4A | |
| Q8WV99_C171 | ZFAND2B AN1-type zinc | 3395 |
| | finger protein 2B | |
| P22102_C237 | GART Trifunctional purine | 3396 |
| | biosynthetic protein adenosine | |
| O75643_C133 | SNRNP200 U5 small nuclear | 3397 |
| | ribonucleoprotein 200 kDa | |
| | helicase | |
| P32322_C95 | PYCR1 Pyrroline-5- | 3398 |
| | carboxylate reductase 1, | |
| | mitochondrial | |
| Q9H1K1_C138 | ISCU Iron-sulfur cluster | 3399 |
| | assembly enzyme ISCU, | |
| | mitochondrial | |
| Q6IA69_C428 | NADSYN1 Glutamine- | 3400 |
| | dependent NAD(+) synthetase | |
| Q9UQ80_C296 | PA2G4 Proliferation- | 3401 |
| | associated protein 2G4 | |
| Q9NP81_C64 | SARS2 Serine--tRNA ligase, | 3402 |
| | mitochondrial | |
| Q6L8Q7_C180 | PDE12 2,5-phosphodiesterase | 3403 |
| | 12 | |
| Q15102_C205 | PAFAH1B3 Platelet-activating | 3404 |
| | factor acetylhydrolase IB | |
| | subunit | |
| Q9Y448_C296 | SKAP Small kinetochore- | 3405 |
| | associated protein | |
| Q01082_C1389 | SPTBN1 Spectrin beta chain, | 3406 |
| | non-erythrocytic 1 | |
| P42704_C113 | LRPPRC Leucine-rich PPR | 3407 |
| | motif-containing protein, | |
| | mitochondrial | |
| O60784_C415 | TOM1 Target of Myb protein | 3408 |
| | 1 | |
| P42858_C1998 | HTT Huntingtin | 3409 |
| A2A288_C517 | ZC3H12D Probable | 3410 |
| | ribonuclease ZC3H12D | |
| P31930_C453 | UQCRC1 Cytochrome b-c1 | 3411 |
| | complex subunit 1, | |
| | mitochondrial | |
| P31939_C287 | ATIC Bifunctional purine | 3412 |
| | biosynthesis protein PURH | |
| Q14980_C2009 | NUMA1 Nuclear mitotic | 3413 |
| | apparatus protein 1 | |
| Q9NSE4_C364 | IARS2 Isoleucine--tRNA | 3414 |
| | ligase, mitochondrial | |
| Q9NSE4_C521 | IARS2 Isoleucine--tRNA | 3415 |
| | ligase, mitochondrial | |
| Q96ER3_C248 | SAAL1 Protein SAAL1 | 3416 |
| Q5M775_C493 | SPECC1 Cytospin-B | 3417 |
| Q9P2J5_C446 | LARS Leucine--tRNA ligase, | 3418 |
| | cytoplasmic | |
| P35236_C204 | PTPN7 Tyrosine-protein | 3419 |
| | phosphatase non-receptor type | |
| | 7 | |
| P14324_C204 | FDPS Farnesyl pyrophosphate | 3420 |
| | synthase | |
| P53597_C142 | SUCLG1 Succinyl-CoA ligase | 3421 |
| Q9GZT3_C48 | SLIRP SRA stem-loop- | 3422 |
| | interacting RNA-binding | |
| | protein, mitochondrial | |
| P10619_C403 | CTSA Lysosomal protective | 3423 |
| | protein | |
| Q9UDY2_C601 | TJP2 Tight junction protein | 3424 |
| | ZO-2 | |
| Q13501_C290 | SQSTM1 Sequestosome-1 | 3425 |
| Q53EL6_C150 | PDCD4 Programmed cell | 3426 |
| | death protein 4 | |
| Q13618_C636 | CUL3 Cullin-3 | 3427 |
| Q93052_C465 | LPP Lipoma-preferred partner | 3428 |
| Q92900_C683 | UPF1 Regulator of nonsense | 3429 |
| | transcripts 1 | |
| Q9Y5P6_C230 | GMPPB Mannose-1-phosphate | 3430 |
| | guanyltransferase beta | |
| O14981_C936 | BTAF1 TATA-binding | 3431 |
| | protein-associated factor 172 | |
| Q9NR31_C102 | SAR1A GTP-binding protein | 3432 |
| | SAR1a | |
| Q92623_C30 | TTC9 Tetratricopeptide repeat | 3433 |
| | protein 9A | |
| P41743_C595 | PRKCI Protein kinase C iota | 3434 |
| | type | |
| Q6NVY1_C163 | HIBCH 3-hydroxyisobutyryl- | 3435 |
| | CoA hydrolase, mitochondrial | |
| Q29RF7_C14 | PDS5A Sister chromatid | 3436 |
| | cohesion protein PDS5 | |
| | homolog A | |
| Q9NQW6_C819 | ANLN Actin-binding protein | 3437 |
| | anillin | |
| Q9Y490_C1434 | TLN1 Talin-1 | 3438 |
| Q86W50_C432 | METTL16 Methyltransferase- | 3439 |
| | like protein 16 | |
| Q8IV48_C75 | ERI1 3-5 exoribonuclease 1 | 3440 |
| Q9Y3Z3_C341 | SAMHD1 SAM domain and | 3441 |
| | HD domain-containing protein | |
| | 1 | |
| P38646_C366 | HSPA9 Stress-70 protein, | 3442 |
| | mitochondrial | |
| P47755_C111 | CAPZA2 F-actin-capping | 3443 |
| | protein subunit alpha-2 | |
| P06730_C170 | EIF4E Eukaryotic translation | 3444 |
| | initiation factor 4E | |
| Q9NR09_C1517 | BIRC6 Baculoviral IAP | 3445 |
| | repeat-containing protein 6 | |
| P00491_C78 | PNP Purine nucleoside | 3446 |
| | phosphorylase | |
| P08397_C261 | HMBS Porphobilinogen | 3447 |
| | deaminase | |
| Q7KZF4_C736 | SND1 Staphylococcal nuclease | 3448 |
| | domain-containing protein | |
| O60292_C235 | SIPA1L3 Signal-induced | 3449 |
| | proliferation-associated 1-like | |
| | protein 3 | |
| Q14166_C528 | TTLL12 Tubulin--tyrosine | 3450 |
| | ligase-like protein 12 | |
| Q14166_C572 | TTLL12 Tubulin--tyrosine | 3451 |
| | ligase-like protein 12 | |
| Q13257_C106 | MAD2L1 Mitotic spindle | 3452 |
| | assembly checkpoint protein | |
| | MAD2A | |
| Q9NY27_C134 | PPP4R2 Serine/threonine- | 3453 |
| | protein phosphatase 4 | |
| | regulatory | |
| P30405_C104 | PPIF Peptidyl-prolyl cis-trans | 3454 |
| | isomerase F, mitochondrial | |
| Q9H0D6_C296 | XRN2 5-3 exoribonuclease 2 | 3455 |
| Q8TDG2_C182 | ACTRT1 Actin-related protein | 3456 |
| | T1 | |
| O00410_C473 | IPO5 Importin-5 | 3457 |
| Q5VUA4_C2168 | ZNF318 Zinc finger protein | 3458 |
| | 318 | |
| Q8IXB1_C700 | DNAJC10 DnaJ homolog | 3459 |
| | subfamily C member 10 | |
| P53621_C975 | COPA Coatomer subunit alpha | 3460 |
| P00441_C147 | SOD1 Superoxide dismutase | 3461 |
| Q00534_C306 | CDK6 Cyclin-dependent | 3462 |
| | kinase 6 | |
| P02545_C570 | LMNA Prelamin-A/C | 3463 |
| P16885_C791 | PLCG2 1-phosphatidylinositol | 3464 |
| | 4,5-bisphosphate | |
| | phosphodiesterase gamma-2 | |
| A0AVT1_C546 | UBA6 Ubiquitin-like modifier- | 3465 |
| | activating enzyme 6 | |
| Q15369_C11 | TCEB1 Transcription | 3466 |
| | elongation factor B | |
| | polypeptide 1 | |
| Q9BVL2_C252 | NUPL1 Nucleoporin p58/p45 | 3467 |
| O15091_C367 | KIAA0391 Mitochondrial | 3468 |
| | ribonuclease P protein 3 | |
| Q92835_C902 | INPP5D Phosphatidylinositol | 3469 |
| | 3,4,5-trisphosphate 5- | |
| | phosphatase 1 | |
| Q92835_C1088 | INPP5D Phosphatidylinositol | 3470 |
| | 3,4,5-trisphosphate 5- | |
| | phosphatase 1 | |
| Q9H3M7_C36 | TXNIP Thioredoxin- | 3471 |
| | interacting protein | |
| Q9H3M7_C333 | TXNIP Thioredoxin- | 3472 |
| | interacting protein | |
| Q92598_C845 | HSPH1 Heat shock protein 105 | 3473 |
| | kDa | |
| Q8NEM2_C612 | SHCBP1 SHC SH2 domain- | 3474 |
| | binding protein 1 | |
| Q92619_C324 | HMHA1 Minor | 3475 |
| | histocompatibility protein HA- | |
| | 1 | |
| O94906_C913 | PRPF6 Pre-mRNA-processing | 3476 |
| | factor 6 | |
| Q5TA50_C163 | GLTPD1 Glycolipid transfer | 3477 |
| | protein domain-containing | |
| | protein 1 | |
| Q9UPN7_C172 | PPP6R1 Serine/threonine- | 3478 |
| | protein phosphatase 6 | |
| | regulatory | |
| Q9P289_C392 | MST4 Serine/threonine-protein | 3479 |
| | kinase MST4 | |
| Q16270_C87 | IGFBP7 Insulin-like growth | 3480 |
| | factor-binding protein 7 | |
| P48556_C112 | PSMD8 26S proteasome non- | 3481 |
| | ATPase regulatory subunit 8 | |
| P49792_C1196 | RANBP2 E3 SUMO-protein | 3482 |
| | ligase RanBP2 | |
| P49792_C2407 | RANBP2 E3 SUMO-protein | 3483 |
| | ligase RanBP2 | |
| Q93008_C1212 | USP9X Probable ubiquitin | 3484 |
| | carboxyl-terminal hydrolase | |
| | FAF | |
| Q9Y617_C98 | PSAT1 Phosphoserine | 3485 |
| | aminotransferase | |
| Q9Y617_C152 | PSAT1 Phosphoserine | 3486 |
| | aminotransferase | |
| Q96AB3_C84 | ISOC2 Isochorismatase | 3487 |
| | domain-containing protein 2, | |
| | mitochondrial | |
| Q9H7Z6_C416 | KAT8 Histone | 3488 |
| | acetyltransferase KAT8 | |
| Q01581_C224 | HMGCS1 | 3489 |
| | Hydroxymethylglutaryl-CoA | |
| | synthase, cytoplasmic | |
| P62633_C57 | CNBP Cellular nucleic acid- | 3490 |
| | binding protein | |
| P39023_C114 | RPL3 60S ribosomal protein | 3491 |
| | L3 | |
| P21333_C210 | FLNA Filamin-A | 3492 |
| P21333_C1353 | FLNA Filamin-A | 3493 |
| O95347_C585 | SMC2 Structural maintenance | 3494 |
| | of chromosomes protein 2 | |
| O00469_C562 | PLOD2 Procollagen-lysine,2- | 3495 |
| | oxoglutarate 5-dioxygenase 2 | |
| P45880_C13 | VDAC2 Voltage-dependent | 3496 |
| | anion-selective channel protein | |
| Q96CM8_C462 | ACSF2 Acyl-CoA synthetase | 3497 |
| | family member 2, | |
| | mitochondrial | |
| P18583_C92 | SON Protein SON | 3498 |
| Q9UKX7_C165 | NUP50 Nuclear pore complex | 3499 |
| | protein Nup50 | |
| Q9UKX7_C416 | NUP50 Nuclear pore complex | 3500 |
| | protein Nup50 | |
| Q99661_C287 | KIF2C Kinesin-like protein | 3501 |
| | KIF2C | |
| P42765_C179 | ACAA2 3-ketoacyl-CoA | 3502 |
| | thiolase, mitochondrial | |
| P49327_C779 | FASN Fatty acid synthase | 3503 |
| P49327_C1828 | FASN Fatty acid synthase | 3504 |
| O75347_C67 | TBCA Tubulin-specific | 3505 |
| | chaperone A | |
| P63010_C95 | AP2B1 AP-2 complex subunit | 3506 |
| | beta | |
| Q9UDR5_C87 | AASS Alpha-aminoadipic | 3507 |
| | semialdehyde synthase, | |
| | mitochondrial | |
| P40925_C154 | MDH1 Malate dehydrogenase, | 3508 |
| | cytoplasmic | |
| Q13363_C38 | CTBP1 C-terminal-binding | 3509 |
| | protein 1 | |
| P41091_C311 | EIF2S3 Eukaryotic translation | 3510 |
| | initiation factor 2 subunit | |
| Q9UKI8_C81 | TLK1 Serine/threonine-protein | 3511 |
| | kinase tousled-like 1 | |
| Q13523_C962 | PRPF4B Serine/threonine- | 3512 |
| | protein kinase PRP4 homolog | |
| Q12768_C385 | KIAA0196 WASH complex | 3513 |
| | subunit strumpellin | |
| Q14203_C636 | DCTN1 Dynactin subunit 1 | 3514 |
| Q96RS6_C111 | NUDCD1 NudC domain- | 3515 |
| | containing protein 1 | |
| Q7L2J0_C153 | MEPCE 7SK snRNA | 3516 |
| | methylphosphate capping | |
| | enzyme | |
| Q8N0Z6_C439 | TTC5 Tetratricopeptide repeat | 3517 |
| | protein 5 | |
| P13716_C223 | ALAD Delta-aminolevulinic | 3518 |
| | acid dehydratase | |
| P12270_C1127 | TPR Nucleoprotein TPR | 3519 |
| Q92973_C205 | TNPO1 Transportin-1 | 3520 |
| P24928_C981 | POLR2A DNA-directed RNA | 3521 |
| | polymerase II subunit RPB1 | |
| P52597_C22 | HNRNPF Heterogeneous | 3522 |
| | nuclear ribonucleoprotein F | |
| Q8TD30_C376 | GPT2 Alanine | 3523 |
| | aminotransferase 2 | |
| Q9Y305_C128 | ACOT9 Acyl-coenzyme A | 3524 |
| | thioesterase 9, mitochondrial | |
| Q8N163_C754 | KIAA1967 DBIRD complex | 3525 |
| | subunit KIAA1967 | |
| Q15149_C530 | PLEC Plectin | 3526 |
| Q15149_C545 | PLEC Plectin | 3527 |
| Q9BX68_C75 | HINT2 Histidine triad | 3528 |
| | nucleotide-binding protein 2, | |
| | mitochondrial | |
| Q9ULW0_C145 | TPX2 Targeting protein for | 3529 |
| | Xklp2 | |
| O14744_C22 | PRMT5 Protein arginine N- | 3530 |
| | methyltransferase 5 | |
| Q5JRX3_C692 | PITRM1 Presequence | 3531 |
| | protease, mitochondrial | |
| P07195_C132 | LDHB L-lactate | 3532 |
| | dehydrogenase B chain | |
| Q96F07_C98 | CYFIP2 Cytoplasmic FMR1- | 3533 |
| | interacting protein 2 | |
| Q9P0K7_C584 | RAI14 Ankycorbin | 3534 |
| P22314_C494 | UBA1 Ubiquitin-like modifier- | 3535 |
| | activating enzyme 1 | |
| P78527_C478 | PRKDC DNA-dependent | 3536 |
| | protein kinase catalytic subunit | |
| P78527_C3187 | PRKDC DNA-dependent | 3537 |
| | protein kinase catalytic subunit | |
| P78527_C3781 | PRKDC DNA-dependent | 3538 |
| | protein kinase catalytic subunit | |
| P42566_C586 | EPS15 Epidermal growth | 3539 |
| | factor receptor substrate 15 | |
| Q86U28_C146 | ISCA2 Iron-sulfur cluster | 3540 |
| | assembly 2 homolog, | |
| | mitochondrial | |
| Q96HE7_C131 | ERO1L ERO1-like protein | 3541 |
| | alpha | |
| Q04724_C526 | TLE1 Transducin-like | 3542 |
| | enhancer protein 1 | |
| Q14789_C2664 | GOLGB1 Golgin subfamily B | 3543 |
| | member 1 | |
| Q9NUQ3_C101 | TXLNG Gamma-taxilin | 3544 |
| Q9ULX6_C128 | AKAP8L A-kinase anchor | 3545 |
| | protein 8-like | |
| Q12905_C271 | ILF2 Interleukin enhancer- | 3546 |
| | binding factor 2 | |
| P23588_C457 | EIF4B Eukaryotic translation | 3547 |
| | initiation factor 4B | |
| P50991_C379 | CCT4 T-complex protein 1 | 3548 |
| | subunit delta | |
| P50991_C450 | CCT4 T-complex protein 1 | 3549 |
| | subunit delta | |
| B0V043_C682 | VARS Valyl-tRNA synthetase | 3550 |
| P22307_C495 | SCP2 Non-specific lipid- | 3551 |
| | transfer protein | |
| Q13472_C244 | TOP3A DNA topoisomerase | 3552 |
| | 3-alpha | |
| Q14315_C1103 | FLNC Filamin-C | 3553 |
| O43747_C539 | AP1G1 AP-1 complex subunit | 3554 |
| | gamma-1 | |
| P23434_C85 | GCSH Glycine cleavage | 3555 |
| | system H protein, | |
| | mitochondrial | |
| Q9H9A6_C23 | LRRC40 Leucine-rich repeat- | 3556 |
| | containing protein 40 | |
| Q8IXH7_C195 | TH1L Negative elongation | 3557 |
| | factor C/D | |
| P22681_C840 | CBL E3 ubiquitin-protein | 3558 |
| | ligase CBL | |
| Q9NVS2_C186 | MRPS18A 28S ribosomal | 3559 |
| | protein S18a, mitochondrial | |
| Q8NF50_C2091 | DOCK8 Dedicator of | 3560 |
| | cytokinesis protein 8 | |
| P09110_C123 | ACAA1 3-ketoacyl-CoA | 3561 |
| | thiolase, peroxisomal | |
| Q8TAF3_C342 | WDR48 WD repeat-containing | 3562 |
| | protein 48 | |
| Q96S55_C347 | WRNIP1 ATPase WRNIP1 | 3563 |
| P45973_C133 | CBX5 Chromobox protein | 3564 |
| | homolog 5 | |
| Q92785_C53 | DPF2 Zinc finger protein ubi- | 3565 |
| | d4 | |
| O43175_C254 | PHGDH D-3- | 3566 |
| | phosphoglycerate | |
| | dehydrogenase | |
| P11388_C405 | TOP2A DNA topoisomerase | 3567 |
| | 2-alpha | |
| Q14699_C211 | RFTN1 Raftlin | 3568 |
| P19367_C823 | HK1 Hexokinase-1 | 3569 |
| Q9BV38_C384 | WDR18 WD repeat-containing | 3570 |
| | protein 18 | |
| Q27J81_C38 | INF2 Inverted formin-2 | 3571 |
| Q27J81_C1093 | INF2 Inverted formin-2 | 3572 |
| Q16740_C86 | CLPP Putative ATP-dependent | 3573 |
| | Clp protease proteolytic | |
| | subunit | |
| P55010_C59 | EIF5 Eukaryotic translation | 3574 |
| | initiation factor 5 | |
| P50213_C331 | IDH3A Isocitrate | 3575 |
| | dehydrogenase | |
| Q9Y692_C113 | GMEB1 Glucocorticoid | 3576 |
| | modulatory element-binding | |
| | protein | |
| Q9C0C9_C341 | UBE2O Ubiquitin-conjugating | 3577 |
| | enzyme E2 O | |
| O15392_C84 | BIRC5 Baculoviral IAP | 3578 |
| | repeat-containing protein 5 | |
| O75533_C1035 | SF3B1 Splicing factor 3B | 3579 |
| | subunit 1 | |
| Q14192_C132 | FHL2 Four and a half LIM | 3580 |
| | domains protein 2 | |
| P33991_C162 | MCM4 DNA replication | 3581 |
| | licensing factor MCM4 | |
| O60684_C208 | KPNA6 Importin subunit | 3582 |
| | alpha-7 | |
| Q92841_C277 | DDX17 Probable ATP- | 3583 |
| | dependent RNA helicase | |
| | DDX17 | |
| P07814_C692 | EPRS Bifunctional | 3584 |
| | glutamate/proline--tRNA | |
| | ligase | |
| P07814_C1076 | EPRS Bifunctional | 3585 |
| | glutamate/proline--tRNA | |
| | ligase | |
| P22102_C733 | GART Trifunctional purine | 3586 |
| | biosynthetic protein adenosine- | |
| | 3 | |
| P32322_C159 | PYCR1 Pyrroline-5- | 3587 |
| | carboxylate reductase 1, | |
| | mitochondrial | |
| O75794_C212 | CDC123 Cell division cycle | 3588 |
| | protein 123 homolog | |
| Q02750_C341 | MAP2K1 Dual specificity | 3589 |
| | mitogen-activated protein | |
| | kinase | |
| Q96RL1_C257 | UIMC1 BRCA1-A complex | 3590 |
| | subunit RAP80 | |
| O15371_C196 | EIF3D Eukaryotic translation | 3591 |
| | initiation factor 3 subunit | |
| Q7L2E3_C346 | DHX30 Putative ATP- | 3592 |
| | dependent RNA helicase | |
| | DHX30 | |
| O00159_C763 | MYO1C Unconventional | 3593 |
| | myosin-Ic | |
| Q8WTW3_C72 | COG1 Conserved oligomeric | 3594 |
| | Golgi complex subunit 1 | |
| Q96KP1_C627 | EXOC2 Exocyst complex | 3595 |
| | component 2 | |
| P62136_C155 | PPP1CA Serine/threonine- | 3596 |
| | protein phosphatase PP1-alpha | |
| | catalytic | |
| Q9UNH7_C348 | SNX6 Sorting nexin-6 | 3597 |
| Q86UY8_C276 | NT5DC3 5-nucleotidase | 3598 |
| | domain-containing protein 3 | |
| P14866_C151 | HNRNPL Heterogeneous | 3599 |
| | nuclear ribonucleoprotein L | |
| P40123_C32 | CAP2 Adenylyl cyclase- | 3600 |
| | associated protein 2 | |
| Q86VQ1_C461 | GLCCII Glucocorticoid- | 3601 |
| | induced transcript 1 protein | |
| Q13451_C394 | FKBP5 Peptidyl-prolyl cis- | 3602 |
| | trans isomerase FKBP5 | |
| Q9P2E9_C1216 | RRBP1 Ribosome-binding | 3603 |
| | protein 1 | |
| P51570_C351 | GALK1 Galactokinase | 3604 |
| Q9NSE4_C155 | IARS2 Isoleucine--tRNA | 3605 |
| | ligase, mitochondrial | |
| Q9BTC0_C976 | DIDO1 Death-inducer | 3606 |
| | obliterator 1 | |
| P07355_C335 | ANXA2 Annexin A2 | 3607 |
| Q5M775_C578 | SPECC1 Cytospin-B | 3608 |
| P17987_C218 | TCP1 T-complex protein 1 | 3609 |
| | subunit alpha | |
| Q99614_C149 | TTC1 Tetratricopeptide repeat | 3610 |
| | protein 1 | |
| O75663_C75 | TIPRL TIP41-like protein | 3611 |
| Q52LW3_C1066 | ARHGAP29 Rho GTPase- | 3612 |
| | activating protein 29 | |
| H3BQZ7_C405 | Uncharacterized protein | 3613 |
| Q9BUL9_C16 | RPP25 Ribonuclease P protein | 3614 |
| | subunit p25 | |
| Q15286_C163 | RAB35 Ras-related protein | 3615 |
| | Rab-35 | |
| P16278_C393 | GLB1 Beta-galactosidase | 3616 |
| Q9HC38_C197 | GLOD4 Glyoxalase domain- | 3617 |
| | containing protein 4 | |
| Q9UM22_C88 | EPDR1 Mammalian | 3618 |
| | ependymin-related protein 1 | |
| Q15056_C85 | EIF4H Eukaryotic translation | 3619 |
| | initiation factor 4H | |
| P23284_C202 | PPIB Peptidyl-prolyl cis-trans | 3620 |
| | isomerase B | |
| P46777_C100 | RPL5 60S ribosomal protein | 3621 |
| | L5 | |
| Q68CZ2_C928 | TNS3 Tensin-3 | 3622 |
| Q68CZ2_C1251 | TNS3 Tensin-3 | 3623 |
| P18031_C215 | PTPN1 Tyrosine-protein | 3624 |
| | phosphatase non-receptor type | |
| | 1 | |
| O95456_C106 | PSMG1 Proteasome assembly | 3625 |
| | chaperone 1 | |
| O95453_C543 | PARN Poly(A)-specific | 3626 |
| | ribonuclease PARN | |
| Q5VTL8_C113 | PRPF38B Pre-mRNA-splicing | 3627 |
| | factor 38B | |
| P31948_C370 | STIP1 Stress-induced- | 3628 |
| | phosphoprotein 1 | |
| O95071_C1476 | UBR5 E3 ubiquitin-protein | 3629 |
| | ligase UBR5 | |
| Q9NQW6_C260 | ANLN Actin-binding protein | 3630 |
| | anillin | |
| Q9NQW6_C437 | ANLN Actin-binding protein | 3631 |
| | anillin | |
| Q9NQW6_C512 | ANLN Actin-binding protein | 3632 |
| | anillin | |
| P51649_C502 | ALDH5A1 Succinate- | 3633 |
| | semialdehyde dehydrogenase, | |
| | mitochondria | |
| P11802_C78 | CDK4 Cyclin-dependent | 3634 |
| | kinase 4 | |
| P49915_C631 | GMPS GMP synthase | 3635 |
| Q9UKN8_C116 | GTF3C4 General transcription | 3636 |
| | factor 3C polypeptide 4 | |
| O60504_C482 | SORBS3 Vinexin | 3637 |
| Q9Y490_C956 | TLN1 Talin-1 | 3638 |
| P23381_C309 | WARS Tryptophan--tRNA | 3639 |
| | ligase, cytoplasmic | |
| P27708_C1696 | CAD CAD protein | 3640 |
| O75607_C79 | NPM3 Nucleoplasmin-3 | 3641 |
| O75131_C506 | CPNE3 Copine-3 | 3642 |
| P38646_C66 | HSPA9 Stress-70 protein, | 3643 |
| | mitochondrial | |
| P49588_C671 | AARS Alanine--tRNA ligase, | 3644 |
| | cytoplasmic | |
| P07602_C33 | PSAP Proactivator polypeptide | 3645 |
| P28065_C63 | PSMB9 Proteasome subunit | 3646 |
| | beta type-9 | |
| P15498_C794 | VAV1 Proto-oncogene vav | 3647 |
| P08559_C273 | PDHA1 Pyruvate | 3648 |
| | dehydrogenase E1 component | |
| | subunit alpha, | |
| Q8WZ82_C129 | OVCA2 Ovarian cancer- | 3649 |
| | associated gene 2 protein | |
| P46939_C1627 | UTRN Utrophin | 3650 |
| Q14166_C361 | TTLL12 Tubulin--tyrosine | 3651 |
| | ligase-like protein 12 | |
| O43314_C488 | PPIP5K2 Inositol | 3652 |
| | hexakisphosphate and | |
| | diphosphoinositol- | |
| | pentakisphosphate kinase 2 | |
| P60981_C147 | DSTN Destrin | 3653 |
| A6NHR9_C444 | SMCHD1 Structural | 3654 |
| | maintenance of chromosomes | |
| | flexible hinge domain | |
| | containing 1 | |
| Q9Y2X0_C539 | MED16 Mediator of RNA | 3655 |
| | polymerase II transcription | |
| | subunit | |
| Q5VYS8_C70 | ZCCHC6 Terminal | 3656 |
| | uridylyltransferase 7 | |
| P24298_C450 | GPT Alanine aminotransferase | 3657 |
| | 1 | |
| P42331_C448 | ARHGAP25 Rho GTPase- | 3658 |
| | activating protein 25 | |
| Q14573_C1638 | ITPR3 Inositol 1,4,5- | 3659 |
| | trisphosphate receptor type 3 | |
| O75717_C716 | WDHD1 WD repeat and | 3660 |
| | HMG-box DNA-binding | |
| | protein 1 | |
| Q9NYV4_C723 | CDK12 Cyclin-dependent | 3661 |
| | kinase 12 | |
| P62487_C38 | POLR2G DNA-directed RNA | 3662 |
| | polymerase II subunit RPB7 | |
| Q96I99_C369 | SUCLG2 Succinyl-CoA ligase | 3663 |
| O00629_C57 | KPNA4 Importin subunit | 3664 |
| | alpha-4 | |
| Q9BW85_C275 | CCDC94 Coiled-coil domain- | 3665 |
| | containing protein 94 | |
| Q9NUQ6_C367 | SPATS2L SPATS2-like | 3666 |
| | protein | |
| Q5VWQ0_C282 | RSBN1 Round spermatid basic | 3667 |
| | protein 1 | |
| Q92835_C1050 | INPP5D Phosphatidylinositol | 3668 |
| | 3,4,5-trisphosphate 5- | |
| | phosphatase 1 | |
| Q9Y6E0_C415 | STK24 Serine/threonine- | 3669 |
| | protein kinase 24 | |
| P49458_C39 | SRP9 Signal recognition | 3670 |
| | particle 9 kDa protein | |
| O43795_C613 | MYO1B Unconventional | 3671 |
| | myosin-Ib | |
| Q9UPN3_C4429 | MACF1 Microtubule-actin | 3672 |
| | cross-linking factor 1, isoforms | |
| P16152_C122 | CBR1 Carbonyl reductase | 3673 |
| Q9BWU0_C224 | SLC4A1AP Kanadaptin | 3674 |
| O75369_C2115 | FLNB Filamin-B | 3675 |
| P48147_C255 | PREP Prolyl endopeptidase | 3676 |
| Q6PL24_C161 | TMED8 Protein TMED8 | 3677 |
| P21980_C10 | TGM2 Protein-glutamine | 3678 |
| | gamma-glutamyltransferase 2 | |
| Q16270_C59 | IGFBP7 Insulin-like growth | 3679 |
| | factor-binding protein 7 | |
| P25205_C446 | MCM3 DNA replication | 3680 |
| | licensing factor MCM3 | |
| Q16181_C280 | SEPT7 Septin-7 | 3681 |
| P83369_C52 | LSM11 U7 snRNA-associated | 3682 |
| | Sm-like protein LSm11 | |
| Q01813_C123 | PFKP 6-phosphofructokinase | 3683 |
| | type C | |
| P49792_C3071 | RANBP2 E3 SUMO-protein | 3684 |
| | ligase RanBP2 | |
| O76031_C586 | CLPX ATP-dependent Clp | 3685 |
| | protease ATP-binding subunit | |
| | clp | |
| Q5T2R2_C315 | PDSS1 Decaprenyl- | 3686 |
| | diphosphate synthase subunit 1 | |
| Q96T76_C356 | MMS19 MMS19 nucleotide | 3687 |
| | excision repair protein | |
| | homolog | |
| Q12996_C646 | CSTF3 Cleavage stimulation | 3688 |
| | factor subunit 3 | |
| P35250_C255 | RFC2 Replication factor C | 3689 |
| | subunit 2 | |
| Q5VVQ6_C97 | YOD1 Ubiquitin thioesterase | 3690 |
| | OTU1 | |
| Q9BXP5_C640 | SRRT Serrate RNA effector | 3691 |
| | molecule homolog | |
| P62701_C181 | RPS4X 40S ribosomal protein | 3692 |
| | S4, X isoform | |
| Q09028_C138 | RBBP4 Histone-binding | 3693 |
| | protein RBBP4 | |
| Q8WXH0_C39 | SYNE2 Nesprin-2 | 3694 |
| P62633_C111 | CNBP Cellular nucleic acid- | 3695 |
| | binding protein | |
| Q8N4X5_C292 | AFAP1L2 Actin filament- | 3696 |
| | associated protein 1-like 2 | |
| Q9HAS0_C182 | C17orf75 Protein Njmu-R1 | 3697 |
| O94806_C29 | PRKD3 Serine/threonine- | 3698 |
| | protein kinase D3 | |
| Q7Z6Z7_C2181 | HUWE1 E3 ubiquitin-protein | 3699 |
| | ligase HUWE1 | |
| P14598_C111 | NCF1 Neutrophil cytosol | 3700 |
| | factor 1 | |
| P23193_C212 | TCEA1 Transcription | 3701 |
| | elongation factor A protein 1 | |
| P60953_C105 | CDC42 Cell division control | 3702 |
| | protein 42 homolog | |
| Q03426_C339 | MVK Mevalonate kinase | 3703 |
| Q9H6S3_C358 | EPS8L2 Epidermal growth | 3704 |
| | factor receptor kinase substrate | |
| P30566_C113 | ADSL Adenylosuccinate lyase | 3705 |
| P51610_C352 | HCFC1 Host cell factor 1 | 3706 |
| Q92616_C1275 | GCN1L1 Translational | 3707 |
| | activator GCN1 | |
| Q92616_C2469 | GCN1L1 Translational | 3708 |
| | activator GCN1 | |
| Q92614_C1080 | MYO18A Unconventional | 3709 |
| | myosin-XVIIIa | |
| Q9BZK7_C434 | TBL1XR1 F-box-like/WD | 3710 |
| | repeat-containing protein | |
| | TBL1XR1 | |
| P53618_C623 | COPB1 Coatomer subunit beta | 3711 |
| Q8TEX9_C42 | IPO4 Importin-4 | 3712 |
| P49327_C1548 | FASN Fatty acid synthase | 3713 |
| Q16875_C155 | PFKFB3 6-phosphofructo-2- | 3714 |
| | kinase/fructose-2,6- | |
| | bisphosphatase | |
| P20839_C331 | IMPDH1 Inosine-5- | 3715 |
| | monophosphate dehydrogenase | |
| | 1 | |
| P40926_C138 | MDH2 Malate dehydrogenase, | 3716 |
| | mitochondrial | |
| P80297_C50 | MT1X Metallothionein-1X | 3717 |
| Q12769_C1166 | NUP160 Nuclear pore | 3718 |
| | complex protein Nup160 | |
| P48059_C100 | LIMS1 LIM and senescent cell | 3719 |
| | antigen-like-containing domain | |
| Q8TBC4_C82 | UBA3 NEDD8-activating | 3720 |
| | enzyme E1 catalytic subunit | |
| P26639_C107 | TARS Threonine--tRNA | 3721 |
| | ligase, cytoplasmic | |
| P13804_C53 | ETFA Electron transfer | 3722 |
| | flavoprotein subunit alpha, | |
| | mitochondrial | |
| A6NE09_C148 | RPSAP58 Protein RPSAP58 | 3723 |
| Q12888_C513 | TP53BP1 Tumor suppressor | 3724 |
| | p53-binding protein 1 | |
| Q02252_C368 | ALDH6A1 Methylmalonate- | 3725 |
| | semialdehyde dehydrogenase | |
| P29144_C967 | TPP2 Tripeptidyl-peptidase 2 | 3726 |
| Q9H1B7_C63 | IRF2BPL Interferon regulatory | 3727 |
| | factor 2-binding protein-like | |
| Q99836_C280 | MYD88 Myeloid | 3728 |
| | differentiation primary | |
| | response protein M | |
| P43487_C158 | RANBP1 Ran-specific | 3729 |
| | GTPase-activating protein | |
| Q6KC79_C304 | NIPBL Nipped-B-like protein | 3730 |
| Q9BTE3_C200 | MCMBP Mini-chromosome | 3731 |
| | maintenance complex-binding | |
| | protein | |
| P42574_C170 | CASP3 Caspase-3 | 3732 |
| Q9NPI6_C39 | DCP1A mRNA-decapping | 3733 |
| | enzyme 1A | |
| O95425_C1101 | SVIL Supervillin | 3734 |
| Q9NS86_C169 | LANCL2 LanC-like protein 2 | 3735 |
| Q8NC60_C393 | NOA1 Nitric oxide-associated | 3736 |
| | protein 1 | |
| O14773_C537 | TPP1 Tripeptidyl-peptidase 1 | 3737 |
| P61088_C87 | UBE2N Ubiquitin-conjugating | 3738 |
| | enzyme E2 N | |
| Q5JRX3_C241 | PITRM1 Presequence | 3739 |
| | protease, mitochondrial | |
| Q5JRX3_C869 | PITRM1 Presequence | 3740 |
| | protease, mitochondrial | |
| Q9BRP1_C100 | PDCD2L Programmed cell | 3741 |
| | death protein 2-like | |
| P61981_C194 | YWHAG 14-3-3 protein gamma | 3742 |
| P01871_C134 | IGHM Ig mu chain C region | 3743 |
| P01871_C451 | IGHM Ig mu chain C region | 3744 |
| Q5T6F2_C104 | UBAP2 Ubiquitin-associated protein 2 | 3745 |
| Q96TA1_C154 | FAM129B Niban-like protein 1 | 3746 |
| P31040_C305 | SDHA Succinate dehydrogenase | 3747 |
| Q96CD2_C7 | PPCDC | 3748 |
| | Phosphopantothenoylcysteine | |
| | decarboxylase | |
| Q9NVU0_C553 | POLR3E DNA-directed RNA | 3749 |
| | polymerase III subunit RPC5 | |
| Q92888_C911 | ARHGEF1 Rho guanine nucleotide | 3750 |
| | exchange factor 1 | |
| Q15020_C537 | SART3 Squamous cell carcinoma | 3751 |
| | antigen recognized by T-cells 3 | |
| Q15022_C46 | SUZ12 Polycomb protein SUZ12 | 3752 |
| Q9UQR0_C559 | SCML2 Sex comb on midleg-like | 3753 |
| | protein 2 | |
| Q14315_C1653 | FLNC Filamin-C | 3754 |
| O94925_C266 | GLS Glutaminase kidney isoform, | 3755 |
| | mitochondrial | |
| Q8NFF5_C561 | FLAD1 FAD synthase | 3756 |
| Q99967_C261 | CITED2 Cbp/p300-interacting | 3757 |
| | transactivator 2 | |
| Q9P287_C141 | BCCIP BRCA2 and CDKN1A- | 3758 |
| | interacting protein | |
| Q7LBC6_C529 | KDM3B Lysine-specific demethylase | 3759 |
| | 3B | |
| Q7LBC6_C569 | KDM3B Lysine-specific demethylase | 3760 |
| | 3B | |
| Q9UGU0_C868 | TCF20 Transcription factor 20 | 3761 |
| Q14683_C1073 | SMC1A Structural maintenance of | 3762 |
| | chromosomes protein 1A | |
| P61513_C39 | RPL37A 60S ribosomal protein L37a | 3763 |
| Q15796_C380 | SMAD2 Mothers against | 3764 |
| | decapentaplegic homolog 2 | |
| Q13547_C100 | HDAC1 Histone deacetylase 1 | 3765 |
| Q9NZT2_C330 | OGFR Opioid growth factor receptor | 3766 |
| P55795_C22 | HNRNPH2 Heterogeneous nuclear | 3767 |
| | ribonucleoprotein H2 | |
| P51812_C229 | RPS6KA3 Ribosomal protein S6 kinase | 3768 |
| | alpha-3 | |
| O15294_C158 | OGT UDP-N-acetylglucosamine-- | 3769 |
| | peptide N-acetylglucosamine (GlcNAc) | |
| | transferase | |
| Q08211_C242 | DHX9 ATP-dependent RNA helicase A | 3770 |
| O43823_C631 | AKAP8 A-kinase anchor protein 8 | 3771 |
| O95819_C883 | MAP4K4 Mitogen-activated protein | 3772 |
| | kinase kinase kinase kinase 4 | |
| Q96AE4_C332 | FUBP1 Far upstream element-binding | 3773 |
| | protein 1 | |
| Q99798_C592 | ACO2 Aconitate hydratase, | 3774 |
| | mitochondrial | |
| Q99797_C518 | M1PEP Mitochondrial intermediate | 3775 |
| | peptidase | |
| O43776_C511 | NARS Asparagine--tRNA ligase, | 3776 |
| | cytoplasmic | |
| P35579_C931 | MYH9 Myosin-9 | 3777 |
| Q9H078_C572 | CLPB Caseinolytic peptidase B protein | 3778 |
| | homolog | |
| Q02962_C52 | PAX2 Paired box protein Pax-2 | 3779 |
| Q9NUG6_C60 | PDRG1 p53 and DNA damage- | 3780 |
| | regulated protein 1 | |
| P22692_C174 | IGFBP4 Insulin-like growth factor- | 3781 |
| | binding protein 4 | |
| Q9BW19_C95 | KIFC1 Kinesin-like protein KIFC1 | 3782 |
| P62879_C294 | GNB2 Guanine nucleotide-binding | 3783 |
| | protein G(I)/G(S)/G(T) | |
| Q9C0C2_C631 | TNKS1BP1 182 kDa tankyrase-1- | 3784 |
| | binding protein | |
| Q9UKG1_C462 | APPL1 DCC-interacting protein 13- | 3785 |
| | alpha | |
| Q12841_C113 | FSTL1 Follistatin-related protein 1 | 3786 |
| O43837_C232 | IDH3B Isocitrate dehydrogenase | 3787 |
| P22102_C291 | GART Trifunctional purine | 3788 |
| | biosynthetic protein adenosine | |
| P22102_C322 | GART Trifunctional purine | 3789 |
| | biosynthetic protein adenosine | |
| P46940_C1534 | IQGAP1 Ras GTPase-activating-like | 3790 |
| | protein IQGAP1 | |
| P11586_C326 | MTHFD1 C-1-tetrahydrofolate | 3791 |
| | synthase, cytoplasmic | |
| P27816_C181 | MAP4 Microtubule-associated protein 4 | 3792 |
| Q9NR46_C252 | SH3GLB2 Endophilin-B2 | 3793 |
| P55060_C387 | CSE1L Exportin-2 | 3794 |
| Q9UQ80_C179 | PA2G4 Proliferation-associated protein | 3795 |
| | 2G4 | |
| Q9NQR4_C170 | NIT2 Omega-amidase NIT2 | 3796 |
| P52306_C85 | RAP1GDS1 Rap1 GTPase-GDP | 3797 |
| | dissociation stimulator 1 | |
| O00571_C298 | DDX3X ATP-dependent RNA helicase | 3798 |
| | DDX3X | |
| Q7L5N1_C283 | COPS6 COP9 signalosome complex | 3799 |
| | subunit 6 | |
| Q01082_C604 | SPTBN1 Spectrin beta chain, non- | 3800 |
| | erythrocytic 1 | |
| O43719_C480 | HTATSF1 HIV Tat-specific factor 1 | 3801 |
| Q9NPB8_C640 | GPCPD1 Glycerophosphocholine | 3802 |
| | phosphodiesterase GPCPD1 | |
| P34932_C417 | HSPA4 Heat shock 70 kDa protein 4 | 3803 |
| P34932_C779 | HSPA4 Heat shock 70 kDa protein 4 | 3804 |
| P21291_C58 | CSRP1 Cysteine and glycine-rich | 3805 |
| | protein 1 | |
| Q9UHR5_C172 | SAP30BP SAP30-binding protein | 3806 |
| P31937_C211 | HIBADH 3-hydroxyisobutyrate | 3807 |
| | dehydrogenase, mitochondrial | |
| P04843_C477 | RPN1 Dolichyl- | 3808 |
| | diphosphooligosaccharide--protein | |
| | glycosyltransferase subunit 1 | |
| Q14980_C658 | NUMA1 Nuclear mitotic apparatus | 3809 |
| | protein 1 | |
| Q9BYV8_C171 | CEP41 Centrosomal protein of 41 kDa | 3810 |
| Q8IUC6_C485 | TICAM1 TIR domain-containing | 3811 |
| | adapter molecule 1 | |
| Q08378_C769 | GOLGA3 Golgin subfamily A member | 3812 |
| | 3 | |
| Q12912_C72 | LRMP Lymphoid-restricted membrane | 3813 |
| | protein | |
| Q9UBD5_C711 | ORC3 Origin recognition complex | 3814 |
| | subunit 3 | |
| O00743_C262 | PPP6C Serine/threonine-protein | 3815 |
| | phosphatase 6 catalytic subunit | |
| Q6P1J9_C145 | CDC73 Parafibromin | 3816 |
| Q1KMD3_C518 | HNRNPUL2 Heterogeneous nuclear | 3817 |
| | ribonucleoprotein U-like protein | |
| Q9P2J5_C70 | LARS Leucine--tRNA ligase, | 3818 |
| | cytoplasmic | |
| Q9P2J5_C83 | LARS Leucine--tRNA ligase, | 3819 |
| | cytoplasmic | |
| P14678_C19 | SNRPB Small nuclear | 3820 |
| | ribonucleoprotein-associated protein | |
| Q9H845_C613 | ACAD9 Acyl-CoA dehydrogenase | 3821 |
| | family member 9, mitochondrial | |
| Q6KB66_C49 | KRT80 Keratin, type II cytoskeletal 80 | 3822 |
| O43143_C190 | DHX15 Putative pre-mRNA-splicing | 3823 |
| | factor ATP-dependent RN | |
| P67775_C20 | PPP2CA Serine/threonine-protein | 3824 |
| | phosphatase 2A catalytic | |
| P04062_C287 | GBA Glucosylceramidase | 3825 |
| Q05086_C108 | UBE3A Ubiquitin-protein ligase E3A | 3826 |
| Q9NPA8_C40 | ENY2 Enhancer of yellow 2 | 3827 |
| | transcription factor homolog | |
| Q9NWZ3_C13 | IRAK4 Interleukin-1 receptor- | 3828 |
| | associated kinase 4 | |
| Q03001_C2128 | DST Dystonin | 3829 |
| P48634_C437 | PRRC2A Protein PRRC2A | 3830 |
| P55196_C1206 | MLLT4 Afadin | 3831 |
| P55196_C1684 | MLLT4 Afadin | 3832 |
| Q9P0W2_C177 | HMG20B SWI/SNF-related matrix- | 3833 |
| | associated actin-dependent | |
| Q8WWI1_C261 | LMO7 LIM domain only protein 7 | 3834 |
| P49903_C71 | SEPHS1 Selenide, water dikinase 1 | 3835 |
| P52435_C31 | POLR2J DNA-directed RNA | 3836 |
| | polymerase II subunit RPB11-a | |
| O43865_C292 | AHCYL1 Putative | 3837 |
| | adenosylhomocysteinase 2 | |
| Q92900_C188 | UPF1 Regulator of nonsense transcripts | 3838 |
| | 1 | |
| Q92871_C57 | PMM1 Phosphomannomutase 1 | 3839 |
| Q15942_C433 | ZYX Zyxin | 3840 |
| Q6UB35_C61 | MTHFD1L Monofunctional C1- | 3841 |
| | tetrahydrofolate synthase, | |
| | mitochondrial | |
| Q9BZF9_C980 | UACA Uveal autoantigen with coiled- | 3842 |
| | coil domains and ankyrin repeats | |
| Q9NYQ6_C1840 | CELSR1 Cadherin EGF LAG seven- | 3843 |
| | pass G-type receptor 1 | |
| O14936_C633 | CASK Peripheral plasma membrane | 3844 |
| | protein CASK | |
| Q96C36_C95 | PYCR2 Pyrroline-5-carboxylate | 3845 |
| | reductase 2 | |
| Q2T9J0_C240 | TYSND1 Peroxisomal leader peptide- | 3846 |
| | processing protease | |
| O14980_C119 | XPO1 Exportin-1 | 3847 |
| P31948_C471 | STIP1 Stress-induced-phosphoprotein 1 | 3848 |
| Q9Y2L1_C194 | DIS3 Exosome complex exonuclease | 3849 |
| | RRP44 | |
| Q96EB1_C412 | ELP4 Elongator complex protein 4 | 3850 |
| P23921_C254 | RRM1 Ribonucleoside-diphosphate | 3851 |
| | reductase large subunit | |
| Q12802_C1232 | AKAP13 A-kinase anchor protein 13 | 3852 |
| Q13404_C144 | UBE2V1 Ubiquitin-conjugating | 3853 |
| | enzyme E2 variant 1 | |
| Q8TDX7_C224 | NEK7 Serine/threonine-protein kinase | 3854 |
| | Nek7 | |
| P27708_C2092 | CAD CAD protein | 3855 |
| Q9Y4B6_C1227 | VPRBP Protein VPRBP | 3856 |
| P23497_C96 | SP100 Nuclear autoantigen Sp-100 | 3857 |
| O75592_C2163 | MYCBP2 Probable E3 ubiquitin- | 3858 |
| | protein ligase MYCBP2 | |
| Q12962_C174 | TAF10 Transcription initiation factor | 3859 |
| | TFIID subunit 10 | |
| Q99700_C556 | ATXN2 Ataxin-2 | 3860 |
| Q9Y5L0_C912 | TNPO3 Transportin-3 | 3861 |
| A1KXE4_C63 | FAM168B Myelin-associated neurite- | 3862 |
| | outgrowth inhibitor | |
| Q13671_C284 | RIN1 Ras and Rab interactor 1 | 3863 |
| P62913_C150 | RPL11 60S ribosomal protein L11 | 3864 |
| Q9H832_C100 | UBE2Z Ubiquitin-conjugating enzyme | 3865 |
| | E2 Z | |
| Q00796_C301 | SORD Sorbitol dehydrogenase | 3866 |
| P00491_C206 | PNP Purine nucleoside phosphorylase | 3867 |
| Q9Y5U2_C99 | TSSC4 Protein TSSC4 | 3868 |
| O96017_C539 | CHEK2 Serine/threonine-protein kinase | 3869 |
| | Chk2 | |
| O96019_C152 | ACTL6A Actin-like protein 6A | 3870 |
| P52701_C694 | MSH6 DNA mismatch repair protein | 3871 |
| | Msh6 | |
| P26440_C378 | IVD Isovaleryl-CoA dehydrogenase, | 3872 |
| | mitochondrial | |
| Q16543_C308 | CDC37 Hsp90 co-chaperone Cdc37 | 3873 |
| Q9NUW8_C135 | TDP1 Tyrosyl-DNA phosphodiesterase | 3874 |
| | 1 | |
| Q14139_C79 | UBE4A Ubiquitin conjugation factor | 3875 |
| | E4 A | |
| Q96FV9_C49 | THOC1 THO complex subunit 1 | 3876 |
| P33992_C397 | MCM5 DNA replication licensing | 3877 |
| | factor MCM5 | |
| Q15417_C273 | CNN3 Calponin-3 | 3878 |
| P41567_C69 | EIF1 Eukaryotic translation initiation | 3879 |
| | factor 1 | |
| P30626_C162 | SRI Sorcin | 3880 |
| A6NHR9_C1433 | SMCHD1 Structural maintenance of | 3881 |
| | chromosomes flexible hinge domain | |
| | containing 1 | |
| O00410_C348 | IPO5 Importin-5 | 3882 |
| O00410_C560 | IPO5 Importin-5 | 3883 |
| O60563_C630 | CCNT1 Cyclin-T1 | 3884 |
| P35580_C678 | MYH10 Myosin-10 | 3885 |
| P60228_C345 | EIF3E Eukaryotic translation initiation | 3886 |
| | factor 3 subunit | |
| P49116_C387 | NR2C2 Nuclear receptor subfamily 2 | 3887 |
| | group C member 2 | |
| P42330_C242 | AKR1C3 Aldo-keto reductase family 1 | 3888 |
| | member C3 | |
| O60271_C1155 | SPAG9 C-Jun-amino-terminal kinase- | 3889 |
| | interacting protein 4 | |
| Q96FA3_C61 | PELI1 E3 ubiquitin-protein ligase | 3890 |
| | pellino homolog 1 | |
| Q96IF1_C224 | AJUBA LIM domain-containing | 3891 |
| | protein ajuba | |
| Q9ULK4_C297 | MED23 Mediator of RNA polymerase | 3892 |
| | II transcription subunit | |
| Q9ULK4_C1319 | MED23 Mediator of RNA polymerase | 3893 |
| | II transcription subunit | |
| O00622_C359 | CYR61 Protein CYR61 | 3894 |
| O95985_C217 | TOP3B DNA topoisomerase 3-beta-1 | 3895 |
| P33240_C62 | CSTF2 Cleavage stimulation factor | 3896 |
| | subunit 2 | |
| P52272_C694 | HNRNPM Heterogeneous nuclear | 3897 |
| | ribonucleoprotein M | |
| A0AVT1_C721 | UBA6 Ubiquitin-like modifier- | 3898 |
| | activating enzyme 6 | |
| Q9BZG1_C116 | RAB34 Ras-related protein Rab-34 | 3899 |
| P53384_C25 | NUBP1 Cytosolic Fe—S cluster | 3900 |
| | assembly factor NUBP1 | |
| Q15181_C114 | PPA1 Inorganic pyrophosphatase | 3901 |
| Q9NPF4_C73 | OSGEP Probable tRNA | 3902 |
| | threonylcarbamoyladenosine | |
| | biosynthesis | |
| Q96FF9_C195 | CDCA5 Sororin | 3903 |
| Q8NFC6_C74 | BOD1L1 Biorientation of chromosomes | 3904 |
| | in cell division protein | |
| Q9UPN7_C37 | PPP6R1 Serine/threonine-protein | 3905 |
| | phosphatase 6 regulatory | |
| Q9UPN9_C447 | TRIM33 E3 ubiquitin-protein ligase | 3906 |
| | TRIM33 | |
| J3QR44_C422 | CDK11B Cyclin-dependent kinase 11B | 3907 |
| Q641Q2_C594 | FAM21A WASH complex subunit | 3908 |
| | FAM21A | |
| O75362_C641 | ZNF217 Zinc finger protein 217 | 3909 |
| P78406_C106 | RAE1 mRNA export factor | 3910 |
| Q6P2I3_C215 | FAHD2B Fumarylacetoacetate | 3911 |
| | hydrolase domain-containing protein | |
| P49770_C310 | EIF2B2 Translation initiation factor | 3912 |
| | eIF-2B subunit beta | |
| Q9Y5A9_C482 | YTHDF2 YTH domain family protein 2 | 3913 |
| P25205_C319 | MCM3 DNA replication licensing | 3914 |
| | factor MCM3 | |
| P36959_C186 | GMPR GMP reductase 1 | 3915 |
| O00273_C165 | DFFA DNA fragmentation factor | 3916 |
| | subunit alpha | |
| P49790_C593 | NUP153 Nuclear pore complex protein | 3917 |
| | Nup153 | |
| Q00610_C1528 | CLTC Clathrin heavy chain 1 | 3918 |
| Q9BZ67_C206 | FRMD8 FERM domain-containing | 3919 |
| | protein 8 | |
| Q5VZ89_C850 | DENND4C DENN domain-containing | 3920 |
| | protein 4C | |
| Q8IY18_C881 | SMC5 Structural maintenance of | 3921 |
| | chromosomes protein 5 | |
| Q9BXP5_C490 | SRRT Serrate RNA effector molecule | 3922 |
| | homolog | |
| P29692_C217 | EEF1D Elongation factor 1-delta | 3923 |
| P29692_C247 | EEF1D Elongation factor 1-delta | 3924 |
| P62979_C121 | RPS27A Ubiquitin-40S ribosomal | 3925 |
| | protein S27a | |
| O75083_C507 | WDR1 WD repeat-containing protein 1 | 3926 |
| Q13131_C185 | PRKAA1 5-AMP-activated protein | 3927 |
| | kinase catalytic subunit | |
| P23368_C441 | ME2 NAD-dependent malic enzyme, | 3928 |
| | mitochondrial | |
| P04637_C141 | TP53 Cellular tumor antigen p53 | 3929 |
| Q7Z6Z7_C1074 | HUWE1 E3 ubiquitin-protein ligase | 3930 |
| | HUWE1 | |
| Q16643_C632 | DBN1 Drebrin | 3931 |
| Q9UPQ0_C55 | LIMCH1 LIM and calponin homology | 3932 |
| | domains-containing protein | |
| Q9NS91_C64 | RAD18 E3 ubiquitin-protein ligase | 3933 |
| | RAD18 | |
| Q7Z3D6_C124 | C14orf159 UPF0317 protein | 3934 |
| | C14orf159, mitochondrial | |
| Q53EZ4_C236 | CEP55 Centrosomal protein of 55 kDa | 3935 |
| P62826_C85 | RAN GTP-binding nuclear protein Ran | 3936 |
| P18583_C2070 | SON Protein SON | 3937 |
| Q92616_C932 | GCN1L1 Translational activator GCN1 | 3938 |
| P22087_C99 | FBL rRNA 2-O-methyltransferase | 3939 |
| | fibrillarin | |
| Q96I24_C460 | FUBP3 Far upstream element-binding | 3940 |
| | protein 3 | |
| Q14657_C113 | LAGE3 L antigen family member 3 | 3941 |
| P49327_C2091 | FASN Fatty acid synthase | 3942 |
| P49327_C2468 | FASN Fatty acid synthase | 3943 |
| Q9UDR5_C534 | AASS Alpha-aminoadipic | 3944 |
| | semialdehyde synthase, mitochondial | |
| Q15746_C83 | MYLK Myosin light chain kinase, | 3945 |
| | smooth muscle | |
| O14929_C120 | HAT1 Histone acetyltransferase type B | 3946 |
| | catalytic subunit | |
| Q9NS87_C862 | KIF15 Kinesin-like protein KIF15 | 3947 |
| Q8TBC4_C139 | UBA3 NEDD8-activating enzyme E1 | 3948 |
| | catalytic subunit | |
| Q13596_C318 | SNX1 Sorting nexin-1 | 3949 |
| P55160_C780 | NCKAP1L Nck-associated protein 1- | 3950 |
| | like | |
| P31150_C202 | GDI1 Rab GDP dissociation inhibitor | 3951 |
| | alpha | |
| Q96BN8_C47 | FAM105B Protein FAM105B | 3952 |
| Q12888_C1703 | TP53BP1 Tumor suppressor p53- | 3953 |
| | binding protein 1 | |
| Q9NRY4_C814 | ARHGAP35 Rho GTPase-activating | 3954 |
| | protein 35 | |
| Q9BV68_C15 | RNF126 RING finger protein 126 | 3955 |
| Q92974_C715 | ARHGEF2 Rho guanine nucleotide | 3956 |
| | exchange factor 2 | |
| Q9HAU4_C716 | SMURF2 E3 ubiquitin-protein ligase | 3957 |
| | SMURF2 | |
| P24928_C1470 | POLR2A DNA-directed RNA | 3958 |
| | polymerase II subunit RPB1 | |
| P07858_C108 | CTSB Cathepsin B | 3959 |
| O75190_C275 | DNAJB6 DnaJ homolog subfamily B | 3960 |
| | member 6 | |
| Q9Y6X8_C11 | ZHX2 Zinc fingers and homeoboxes | 3961 |
| | protein 2 | |
| P62263_C85 | RPS14 40S ribosomal protein S14 | 3962 |
| P31146_C195 | CORO1A Coronin-1A | 3963 |
| Q9H2M9_C1336 | RAB3GAP2 Rab3 GTPase-activating | 3964 |
| | protein non-catalytic subunit | |
| O60825_C105 | PFKFB2 6-phosphofructo-2- | 3965 |
| | kinase/fructose-2,6-bisphosphatase 2 | |
| Q9NTJ3_C271 | SMC4 Structural maintenance of | 3966 |
| | chromosomes protein 4 | |
| Q00577_C292 | PURA Transcriptional activator protein | 3967 |
| | Pur-alpha | |
| Q5VT52_C903 | RPRD2 Regulation of nuclear pre- | 3968 |
| | mRNA domain-containing protein | |
| Q9UKV3_C733 | ACIN1 Apoptotic chromatin | 3969 |
| | condensation inducer in the nucleus | |
| Q92552_C49 | MRPS27 28S ribosomal protein S27, | 3970 |
| | mitochondrial | |
| Q96MG7_C283 | NDNL2 Melanoma-associated antigen | 3971 |
| | G1 | |
| Q7L5D6_C205 | GET4 Golgi to ER traffic protein 4 | 3972 |
| | homolog | |
| Q8N556_C471 | AFAP1 Actin filament-associated | 3973 |
| | protein 1 | |
| Q8N556_C506 | AFAP1 Actin filament-associated | 3974 |
| | protein 1 | |
| P62987_C115 | UBA52 Ubiquitin-60S ribosomal | 3975 |
| | protein L40 | |
| Q96HE7_C35 | ERO1L ERO1-like protein alpha | 3976 |
| Q6IBS0_C275 | TWF2 Twinfilin-2 | 3977 |
| Q04724_C89 | TLE1 Transducin-like enhancer protein | 3978 |
| | 1 | |
| Q9H3U1_C650 | UNC45A Protein unc-45 homolog A | 3979 |
| O43374_C797 | RASA4 Ras GTPase-activating protein | 3980 |
| | 4 | |
| Q9NUQ8_C628 | ABCF3 ATP-binding cassette sub- | 3981 |
| | family F member 3 | |
| Q9UJF2_C443 | RASAL2 Ras GTPase-activating | 3982 |
| | protein nGAP | |
| P61160_C11 | ACTR2 Actin-related protein 2 | 3983 |
| Q7Z6M1_C115 | RABEPK Rab9 effector protein with | 3984 |
| | kelch motifs | |
| Q13418_C422 | ILK Integrin-linked protein kinase | 3985 |
| P30153_C317 | PPP2R1A Serine/threonine-protein | 3986 |
| | phosphatase 2A 65 kDa regulatory | |
| | subunit A alpha isoform | |
| P62273_C39 | RPS29 40S ribosomal protein S29 | 3987 |
| P61218_C76 | POLR2F DNA-directed RNA | 3988 |
| | polymerases I, II, and III subunit | |
| P58546_C83 | MTPN Myotrophin | 3989 |
| Q92888_C815 | ARHGEF1 Rho guanine nucleotide | 3990 |
| | exchange factor 1 | |
| Q9BZX2_C241 | UCK2 Uridine-cytidine kinase 2 | 3991 |
| O43815_C316 | STRN Striatin | 3992 |
| O94925_C463 | GLS Glutaminase kidney isoform, | 3993 |
| | mitochondrial | |
| P42224_C155 | STAT1 Signal transducer and activator | 3994 |
| | of transcription 1 | |
| P30837_C169 | ALDH1B1 Aldehyde dehydrogenase X, | 3995 |
| | mitochondrial | |
| P62140_C139 | PPP1CB Serine/threonine-protein | 3996 |
| | phosphatase PP1-beta catalytic | |
| Q6XQN6_C533 | NAPRT1 Nicotinate | 3997 |
| | phosphoribosyltransferase | |
| Q96DM3_C333 | C18orf8 Uncharacterized protein | 3998 |
| | C18orf8 | |
| P33764_C53 | S100A3 Protein S100-A3 | 3999 |
| Q96F86_C91 | EDC3 Enhancer of mRNA-decapping | 4000 |
| | protein 3 | |
| O00221_C187 | NFKBIE NF-kappa-B inhibitor epsilon | 4001 |
| Q9ULC4_C144 | MCTS1 Malignant T-cell-amplified | 4002 |
| | sequence 1 | |
| O60841_C635 | EIF5B Eukaryotic translation initiation | 4003 |
| | factor 5B | |
| Q5TFE4_C179 | NT5DC1 5-nucleotidase domain- | 4004 |
| | containing protein 1 | |
| Q9UNM6_C114 | PSMD13 26S proteasome non-ATPase | 4005 |
| | regulatory subunit 13 | |
| O43847_C1109 | NRD1 Nardilysin | 4006 |
| Q9HAV4_C1157 | XPO5 Exportin-5 | 4007 |
| O43172_C441 | PRPF4 U4/U6 small nuclear | 4008 |
| | ribonucleoprotein Prp4 | |
| Q8IXW5_C105 | RPAP2 Putative RNA polymerase II | 4009 |
| | subunit B1 CTD phosphatase | |
| Q6QNY0_C180 | BLOC1S3 Biogenesis of lysosome- | 4010 |
| | related organelles complex | |
| Q14697_C423 | GANAB Neutral alpha-glucosidase AB | 4011 |
| Q27J81_C394 | INF2 Inverted formin-2 | 4012 |
| P60900_C137 | PSMA6 Proteasome subunit alpha type- | 4013 |
| | 6 | |
| P55786_C66 | NPEPPS Puromycin-sensitive | 4014 |
| | aminopeptidase | |
| P62879_C317 | GNB2 Guanine nucleotide-binding | 4015 |
| | protein G(I)/G(S)/G(T) | |
| Q9Y692_C274 | GMEB1 Glucocorticoid modulatory | 4016 |
| | element-binding protein | |
| O00567_C52 | NOP56 Nucleolar protein 56 | 4017 |
| Q9C0C2_C1296 | TNKS1BP1 182 kDa tankyrase-1- | 4018 |
| | binding protein | |
| Q15008_C58 | PSMD6 26S proteasome non-ATPase | 4019 |
| | regulatory subunit 6 | |
| O75533_C677 | SF3B1 Splicing factor 3B subunit 1 | 4020 |
| E7EVK2_C23 | MTG1 Mitochondrial GTPase 1 | 4021 |
| O95336_C78 | PGLS 6-phosphogluconolactonase | 4022 |
| Q9C0B1_C326 | FTO Alpha-ketoglutarate-dependent | 4023 |
| | dioxygenase FTO | |
| Q8TEU7_C1368 | RAPGEF6 Rap guanine nucleotide | 4024 |
| | exchange factor 6 | |
| P35568_C923 | IRS1 Insulin receptor substrate 1 | 4025 |
| P04049_C637 | RAF1 RAF proto-oncogene | 4026 |
| | serine/threonine-protein kinase | |
| P60660_C138 | MYL6 Myosin light polypeptide 6 | 4027 |
| Q8NDH3_C189 | NPEPL1 Probable aminopeptidase | 4028 |
| | NPEPL1 | |
| P25786_C182 | PSMA1 Proteasome subunit alpha type- | 4029 |
| | 1 | |
| Q7L591_C385 | DOK3 Docking protein 3 | 4030 |
| Q9UJM3_C146 | ERRFI1 ERBB receptor feedback | 4031 |
| | inhibitor 1 | |
| O00159_C679 | MYO1C Unconventional myosin-Ic | 4032 |
| P55060_C61 | CSE1L Exportin-2 | 4033 |
| P14868_C130 | DARS Aspartate--tRNA ligase, | 4034 |
| | cytoplasmic | |
| P14868_C259 | DARS Aspartate--tRNA ligase, | 4035 |
| | cytoplasmic | |
| P45954_C261 | ACADSB Short/branched chain | 4036 |
| | specific acyl-CoA dehydrogenase | |
| Q01664_C29 | TFAP4 Transcription factor AP-4 | 4037 |
| P08138_C381 | NGFR Tumor necrosis factor receptor | 4038 |
| | superfamily member | |
| O60671_C239 | RAD1 Cell cycle checkpoint protein | 4039 |
| | RAD1 | |
| P46379_C856 | BAG6 Large proline-rich protein BAG6 | 4040 |
| P26022_C103 | PTX3 Pentraxin-related protein PTX3 | 4041 |
| Q9BYX2_C651 | TBC1D2 TBC1 domain family member | 4042 |
| | 2A | |
| P23610_C76 | F8A3 Factor VIII intron 22 protein | 4043 |
| Q9NZE8_C119 | MRPL35 39S ribosomal protein L35, | 4044 |
| | mitochondrial | |
| Q9UJZ1_C167 | STOML2 Stomatin-like protein 2 | 4045 |
| P31937_C251 | HIBADH 3-hydroxyisobutyrate | 4046 |
| | dehydrogenase, mitochondrial | |
| Q9NR56_C34 | MBNL1 Muscleblind-like protein 1 | 4047 |
| Q9P0V9_C100 | SEPT10 Septin-10 | 4048 |
| Q96AT9_C23 | RPE Ribulose-phosphate 3-epimerase | 4049 |
| Q08378_C1431 | GOLGA3 Golgin subfamily A member | 4050 |
| | 3 | |
| Q9Y4X5_C161 | ARIH1 E3 ubiquitin-protein ligase | 4051 |
| | ARIH1 | |
| P09417_C161 | QDPR Dihydropteridine reductase | 4052 |
| Q7L014_C377 | DDX46 Probable ATP-dependent RNA | 4053 |
| | helicase DDX46 | |
| Q7L014_C501 | DDX46 Probable ATP-dependent RNA | 4054 |
| | helicase DDX46 | |
| Q92917_C137 | GPKOW G patch domain and KOW | 4055 |
| | motifs-containing protein | |
| P28340_C1058 | POLD1 DNA polymerase delta | 4056 |
| | catalytic subunit | |
| P53350_C212 | PLK1 Serine/threonine-protein kinase | 4057 |
| | PLK1 | |
| Q86VP6_C942 | CAND1 Cullin-associated NEDD8- | 4058 |
| | dissociated protein 1 | |
| P35237_C350 | SERPINB6 Serpin B6 | 4059 |
| P67775_C266 | PPP2CA Serine/threonine-protein | 4060 |
| | phosphatase 2A catalytic | |
| Q14152_C478 | EIF3A Eukaryotic translation initiation | 4061 |
| | factor 3 subunit | |
| P19338_C543 | NCL Nucleolin | 4062 |
| Q16576_C277 | RBBP7 Histone-binding protein | 4063 |
| | RBBP7 | |
| Q5UIP0VC2274 | RIF1 Telomere-associated protein RIF1 | 4064 |
| O60566_C578 | BUB1B Mitotic checkpoint | 4065 |
| | serine/threonine-protein kinase | |
| O60566_C723 | BUB1B Mitotic checkpoint | 4066 |
| | serine/threonine-protein kinase | |
| Q9UBU9_C252 | NXF1 Nuclear RNA export factor 1 | 4067 |
| P41134_C34 | ID1 DNA-binding protein inhibitor ID- | 4068 |
| | 1 | |
| Q03001_C5610 | DST Dystonin | 4069 |
| P49720_C19 | PSMB3 Proteasome subunit beta type-3 | 4070 |
| Q15054_C129 | POLD3 DNA polymerase delta subunit | 4071 |
| | 3 | |
| Q9Y223_C183 | GNE Bifunctional UDP-N- | 4072 |
| | acetylglucosamine 2-epimerase/N | |
| P31323_C373 | PRKAR2B cAMP-dependent protein | 4073 |
| | kinase type II-beta regulatory subunit | |
| | beta | |
| Q08257_C145 | CRYZ Quinone oxidoreductase | 4074 |
| P18031_C344 | PTPN1 Tyrosine-protein phosphatase | 4075 |
| | non-receptor type 1 | |
| P04075_C240 | ALDOA Fructose-bisphosphate | 4076 |
| | aldolase A | |
| Q8WYP5_C1261 | AHCTF1 Protein ELYS | 4077 |
| Q14145_C3I9 | KEAP1 Kelch-like ECH-associated | 4078 |
| | protein 1 | |
| Q14141_C432 | SEPT6 Septin-6 | 4079 |
| P46821_C261 | MAP1B Microtubule-associated protein | 4080 |
| | 1B | |
| O00291_C249 | HIP1 Huntingtin-interacting protein 1 | 4081 |
| Q96A65_C106 | EXOC4 Exocyst complex component 4 | 4082 |
| P34896_C389 | SHMT1 Serine | 4083 |
| | hydroxymethyltransferase, cytosolic | |
| Q6XZF7_C327 | DNMBP Dynamin-binding protein | 4084 |
| O95671_C274 | ASMTL N-acetylserotonin O- | 4085 |
| | methyltransferase-like protein | |
| P09960_C147 | LTA4H Leukotriene A-4 hydrolase | 4086 |
| P09960_C200 | LTA4H Leukotriene A-4 hydrolase | 4087 |
| Q86WB0_C125 | ZC3HC1 Nuclear-interacting partner of | 4088 |
| | ALK | |
| Q96EP5_C63 | DAZAP1 DAZ-associated protein 1 | 4089 |
| Q9Y490_C732 | TLN1 Talin-1 | 4090 |
| Q9Y490_C1506 | TLN1 Talin-1 | 4091 |
| P27708_C2161 | CAD CAD protein | 4092 |
| O95628_C175 | CNOT4 CCR4-NOT transcription | 4093 |
| | complex subunit 4 | |
| Q02535_C16 | ID3 DNA-binding protein inhibitor ID- | 4094 |
| | 3 | |
| P23497_C238 | SP100 Nuclear autoantigen Sp-100 | 4095 |
| P23497_C468 | SP100 Nuclear autoantigen Sp-100 | 4096 |
| Q8IV63_C191 | VRK3 Inactive serine/threonine-protein | 4097 |
| | kinase VRK3 | |
| Q7L5Y1_C307 | ENOSF1 Mitochondrial enolase | 4098 |
| | superfamily member 1 | |
| Q9UBW7_C1331 | ZMYM2 Zinc finger MYM-type | 4099 |
| | protein 2 | |
| O15446_C86 | CD3EAP DNA-directed RNA | 4100 |
| | polymerase I subunit RPA34 | |
| P54136_C312 | RARS Arginine-tRNA ligase, | 4101 |
| | cytoplasmic | |
| P49748_C215 | ACADVL Very long-chain specific | 4102 |
| | acyl-CoA dehydrogenase, | |
| | mitochondrial | |
| Q9BRX2VC175 | PELO Protein pelota homolog | 4103 |
| O95544_C69 | NADK NAD kinase | 4104 |
| Q969W3_C159 | FAM104A Protein FAM104A | 4105 |
| P62917_C195 | RPL8 60S ribosomal protein L8 | 4106 |
| Q00839_C335 | HNRNPU Heterogeneous nuclear | 4107 |
| | ribonucleoprotein U | |
| P00568_C25 | AK1 Adenylate kinase isoenzyme 1 | 4108 |
| D6RAD4_C275 | CDK7 Cyclin-dependent kinase 7 | 4109 |
| P49368_C475 | CCT3 T-complex protein 1 subunit | 4110 |
| | gamma | |
| Q53S33_C59 | BOLA3 BolA-like protein 3 | 4111 |
| Q96A49_C283 | SYAP1 Synapse-associated protein 1 | 4112 |
| Q6ZS81_C1665 | WDFY4 WD repeat- and FYVE | 4113 |
| | domain-containing protein 4 | |
| P60981_C39 | DSTN Destrin | 4114 |
| P51531_C1296 | SMARCA2 Probable global | 4115 |
| | transcription activator SNF2L2 | |
| Q7Z417_C234 | NUFIP2 Nuclear fragile X mental | 4116 |
| | retardation-interacting protein | |
| O00410_C180 | IPO5 Importin-5 | 4117 |
| O00410_C972 | IPO5 Importin-5 | 4118 |
| Q9NTK5_C187 | OLA1 Obg-like ATPase 1 | 4119 |
| P60228_C350 | EIF3E Eukaryotic translation initiation | 4120 |
| | factor 3 subunit | |
| Q96CP2_C132 | FLYWCH2 FLYWCH family member | 4121 |
| | 2 | |
| H0YGG7_C34 | Uncharacterized protein | 4122 |
| Q92538_C1766 | GBF1 Golgi-specific brefeldin A- | 4123 |
| | resistance guanine nucleus | |
| O95081_C39 | AGFG2 Arf-GAP domain and FG | 4124 |
| | repeat-containing protein 2 | |
| Q16531_C977 | DDB1 DNA damage-binding protein 1 | 4125 |
| P28482_C254 | MAPK1 Mitogen-activated protein | 4126 |
| | kinase 1 | |
| P36578_C208 | RPL4 60S ribosomal protein L4 | 4127 |
| Q8NC26_C75 | ZNF114 Zinc finger protein 114 | 4128 |
| Q9BQ69_C199 | MACROD1 O-acetyl-ADP-ribose | 4129 |
| | deacetylase MACROD1 | |
| B2RTY4_C2032 | MYO9A Unconventional myosin-IXa | 4130 |
| Q9NZL9_C17 | MAT2B Methionine | 4131 |
| | adenosyltransferase 2 subunit beta | |
| P30291_C19 | WEE1 Wee1-like protein kinase | 4132 |
| Q53ET0_C675 | CRTC2 CREB-regulated transcription | 4133 |
| | coactivator 2 | |
| P02765_C219 | AHSG Alpha-2-HS-glycoprotein | 4134 |
| Q96T60_C353 | PNKP Bifunctional polynucleotide | 4135 |
| | phosphatase/kinase | |
| P43034_C252 | PAFAH1B1 Platelet-activating factor | 4136 |
| | acetylhydrolase 1B subunit | |
| Q9P215_C39 | POGK Pogo transposable element with | 4137 |
| | KRAB domain | |
| P09001_C338 | MRPL3 39S ribosomal protein L3, | 4138 |
| | mitochondrial | |
| Q8NFC6_C2164 | BOD1L1 Biorientation of chromosomes | 4139 |
| | in cell division protein | |
| Q13126_C136 | MTAP S-methyl-5-thioadenosine | 4140 |
| | phosphorylase | |
| Q9Y6I3_C205 | EPN1 Epsin-1 | 4141 |
| Q9HA47_C236 | UCK1 Uridine-cytidine kinase 1 | 4142 |
| Q96KG9_C88 | SCYL1 N-terminal kinase-like protein | 4143 |
| P49419_C70 | ALDH7A1 Alpha-aminoadipic | 4144 |
| | semialdehyde dehydrogenase | |
| Q96RU3_C511 | FNBP1 Formin-binding protein 1 | 4145 |
| Q96RU2_C733 | USP28 Ubiquitin carboxyl-terminal | 4146 |
| | hydrolase 28 | |
| Q16270_C71 | IGFBP7 Insulin-like growth factor- | 4147 |
| | binding protein 7 | |
| P50395_C302 | GDI2 Rab GDP dissociation inhibitor | 4148 |
| | beta | |
| P50395_C414 | GDI2 Rab GDP dissociation inhibitor | 4149 |
| | beta | |
| P40306_C17 | PSMB10 Proteasome subunit beta type- | 4150 |
| | 10 | |
| Q16181_C204 | SEPT7 Septin-7 | 4151 |
| P60891_C41 | PRPS1 Ribose-phosphate | 4152 |
| | pyrophosphokinase 1 | |
| Q00403_C223 | GTF2B Transcription initiation factor | 4153 |
| | IIB | |
| O95816_C142 | BAG2 BAG family molecular | 4154 |
| | chaperone regulator 2 | |
| Q00610_C926 | CLTC Clathrin heavy chain 1 | 4155 |
| Q00610_C1102 | CLTC Clathrin heavy chain 1 | 4156 |
| Q12996_C176 | CSTF3 Cleavage stimulation factor | 4157 |
| | subunit 3 | |
| Q9BXB5_C33 | OSBPL10 Oxysterol-binding protein- | 4158 |
| | related protein 10 | |
| P46013_C475 | MKI67 Antigen KI-67 | 4159 |
| P46013_C1251 | MKI67 Antigen KI-67 | 4160 |
| O94979_C704 | SEC31A Protein transport protein | 4161 |
| | Sec31A | |
| O75083_C170 | WDR1 WD repeat-containing protein 1 | 4162 |
| O43252_C53 | PAPSS1 Bifunctional 3- | 4163 |
| | phosphoadenosine 5-phosphosulfate | |
| Q13131_C117 | PRKAA1 5-AMP-activated protein | 4164 |
| | kinase catalytic subunit | |
| P62633_C158 | CNBP Cellular nucleic acid-binding | 4165 |
| | protein | |
| P52732_C695 | KIF11 Kinesin-like protein KIF11 | 4166 |
| Q8TD16_C437 | BICD2 Protein bicaudal D homolog 2 | 4167 |
| Q14008_C1768 | CKAP5 Cytoskeleton-associated | 4168 |
| | protein 5 | |
| P60604_C89 | UBE2G2 Ubiquitin-conjugating | 4169 |
| | enzyme E2 G2 | |
| Q9UHY1_C478 | NRBP1 Nuclear receptor-binding | 4170 |
| | protein | |
| Q9BPX3_C317 | NCAPG Condensin complex subunit 3 | 4171 |
| Q9NZJ9_C131 | NUDT4 Diphosphoinositol | 4172 |
| | polyphosphate phosphohydrolase 2 | |
| P21333_C1165 | FLNA Filamin-A | 4173 |
| P13010_C296 | XRCC5 X-ray repair cross- | 4174 |
| | complementing protein 5 | |
| Q9NRX1_C64 | PNO1 RNA-binding protein PNO1 | 4175 |
| Q9NRX2_C129 | MRPL17 39S ribosomal protein L17, | 4176 |
| | mitochondrial | |
| O75414_C163 | NME6 Nucleoside diphosphate kinase 6 | 4177 |
| Q96CU9_C116 | FOXRED1 FAD-dependent | 4178 |
| | oxidoreductase domain-containing | |
| | protein | |
| Q6DN90_C485 | IQSEC1 IQ motif and SEC7 domain- | 4179 |
| | containing protein 1 | |
| P01033_C168 | TIMP1 Metalloproteinase inhibitor 1 | 4180 |
| Q92616_C1161 | GCN1L1 Translational activator GCN1 | 4181 |
| Q53GL7_C50 | PARP10 Poly | 4182 |
| Q9UH65_C260 | SWAP70 Switch-associated protein 70 | 4183 |
| Q9UH65_C261 | SWAP70 Switch-associated protein 70 | 4184 |
| P46060_C338 | RANGAP1 Ran GTPase-activating | 4185 |
| | protein 1 | |
| P68402_C35 | PAFAH1B2 Platelet-activating factor | 4186 |
| | acetylhydrolase IB subunit | |
| P61964_C205 | WDR5 WD repeat-containing protein 5 | 4187 |
| P49327_C223 | FASN Fatty acid synthase | 4188 |
| Q99536_C86 | VAT1 Synaptic vesicle membrane | 4189 |
| | protein VAT-1 homolog | |
| Q8N1G4_C249 | LRRC47 Leucine-rich repeat- | 4190 |
| | containing protein 47 | |
| O14972_C221 | DSCR3 Down syndrome critical region | 4191 |
| | protein 3 | |
| O60232_C125 | SSSCA1 Sjoegren | 4192 |
| | syndrome/scleroderma autoantigen 1 | |
| O95619_C210 | YEATS4 YEATS domain-containing | 4193 |
| | protein 4 | |
| P57772_C93 | EEFSEC Selenocysteine-specific | 4194 |
| | elongation factor | |
| P13489_C248 | RNH1 Ribonuclease inhibitor | 4195 |
| P13489_C362 | RNH1 Ribonuclease inhibitor | 4196 |
| Q8ND83_C449 | SLAIN1 SLAIN motif-containing | 4197 |
| | protein 1 | |
| Q9BUK6_C411 | MSTO1 Protein misato homolog 1 | 4198 |
| Q12888_C329 | TP53BP1 Tumor suppressor p53- | 4199 |
| | binding protein 1 | |
| Q15910_C14 | EZH2 Histone-lysine N- | 4200 |
| | methyltransferase EZH2 | |
| Q99832_C370 | CCT7 T-complex protein 1 subunit eta | 4201 |
| Q9BZH6_C363 | WDR11 WD repeat-containing protein | 4202 |
| | 11 | |
| Q07864_C1935 | POLE DNA polymerase epsilon | 4203 |
| | catalytic subunit A | |
| Q92974_C383 | ARHGEF2 Rho guanine nucleotide | 4204 |
| | exchange factor 2 | |
| Q9BTE3_C636 | MCMBP Mini-chromosome | 4205 |
| | maintenance complex-binding protein | |
| P54578_C203 | USP14 Ubiquitin carboxyl-terminal | 4206 |
| | hydrolase 14 | |
| P54578_C415 | USP14 Ubiquitin carboxyl-terminal | 4207 |
| | hydrolase 14 | |
| O75995_C152 | SASH3 SAM and SH3 domain- | 4208 |
| | containing protein 3 | |
| O95425_C671 | SVIL Supervillin | 4209 |
| Q9UHI6_C577 | DDX20 Probable ATP-dependent RNA | 4210 |
| | helicase DDX20 | |
| Q9H9Q2_C240 | COPS7B COP9 signalosome complex | 4211 |
| | subunit 7b | |
| P62191_C58 | PSMC1 26S protease regulatory subunit | 4212 |
| | 4 | |
| P62195_C363 | PSMC5 26S protease regulatory subunit | 4213 |
| | 8 | |
| P11413_C294 | G6PD Glucose-6-phosphate 1- | 4214 |
| | dehydrogenase | |
| P11142_C267 | HSPA8 Heat shock cognate 71 kDa | 4215 |
| | protein | |
| Q9NQX3_C419 | GPHN Gephyrin | 4216 |
| P61081_C47 | UBE2M NEDD8-conjugating enzyme | 4217 |
| | Ubc12 | |
| Q9Y6W3_C767 | CAPN7 Calpain-7 | 4218 |
| Q01844_C524 | EWSR1 RNA-binding protein EWS | 4219 |
| Q9Y2Q3_C27 | GSTK1 Glutathione S-transferase | 4220 |
| | kappa 1 | |
| O60825_C28 | PFKFB2 6-phosphofructo-2- | 4221 |
| | kinase/fructose-2,6-bisphosphatase | |
| Q9GZV4_C73 | EIF5A2 Eukaryotic translation | 4222 |
| | initiation factor 5A-2 | |
| Q9NXV6_C24 | CDKN2AIP CDKN2A-interacting | 4223 |
| | protein | |
| Q9UID3_C316 | VPS51 Vacuolar protein sorting- | 4224 |
| | associated protein 51 homolog | |
| Q99829_C30 | CPNE1 Copine-1 | 4225 |
| Q5VT52_C416 | RPRD2 Regulation of nuclear pre- | 4226 |
| | mRNA domain-containing protein 2 | |
| P22314_C906 | UBA1 Ubiquitin-like modifier- | 4227 |
| | activating enzyme 1 | |
| Q9UKV3_C691 | ACIN1 Apoptotic chromatin | 4228 |
| | condensation inducer in the nucleus | |
| Q86U28_C144 | ISCA2 Iron-sulfur cluster assembly 2 | 4229 |
| | homolog, mitochondrial | |
| Q15814_C184 | TBCC Tubulin-specific chaperone C | 4230 |
| P42695_C1484 | NCAPD3 Condensin-2 complex subunit | 4231 |
| | D3 | |
| Q14493_C72 | SLBP Histone RNA hairpin-binding | 4232 |
| | protein | |
| Q14258_C498 | TRIM25 E3 ubiquitin/ISG15 ligase | 4233 |
| | TRIM25 | |
| Q9H3U1_C384 | UNC45A Protein unc-45 homolog A | 4234 |
| O43374_C396 | RASA4 Ras GTPase-activating protein | 4235 |
| | 4 | |
| P82921_C49 | MRPS21 28S ribosomal protein S21, | 4236 |
| | mitochondrial | |
| P20810_C241 | CAST Calpastatin | 4237 |
| P20810_C413 | CAST Calpastatin | 4238 |
| Q9Y5S9_C149 | RBM8A RNA-binding protein 8A | 4239 |
| P31997_C299 | CEACAM8 Carcinoembryonic antigen- | 4240 |
| | related cell adhesion molecule 8 | |
| Q9ULV4_C39 | CORO1C Coronin-1C | 4241 |
| PI1172_C174 | UMPS Uridine 5-monophosphate | 4242 |
| | synthase | |
| Q6NXE6_C297 | ARMC6 Armadillo repeat-containing | 4243 |
| | protein 6 | |
| Q92797_C578 | SYMPK Symplekin | 4244 |
| P45984_C116 | MAPK9 Mitogen-activated protein | 4245 |
| | kinase 9 | |
| P50995_C294 | ANXA11 Annexin A11 | 4246 |
| O95376_C161 | ARIH2 E3 ubiquitin-protein ligase | 4247 |
| | ARIH2 | |
| B0V043_C381 | VARS Valyl-tRNA synthetase | 4248 |
| B0V043_C444 | VARS Valyl-tRNA synthetase | 4249 |
| P49848_C130 | TAF6 Transcription initiation factor | 4250 |
| | TFIID subunit 6 | |
| Q86UV5_C850 | USP48 Ubiquitin carboxyl-terminal | 4251 |
| | hydrolase 48 | |
| Q9Y2H0_C726 | DLGAP4 Disks large-associated protein | 4252 |
| | 4 | |
| Q92947_C176 | GCDH Glutaryl-CoA dehydrogenase, | 4253 |
| | mitochondrial | |
| Q9UKW4_C800 | VAV3 Guanine nucleotide exchange | 4254 |
| | factor VAV3 | |
| P35610_C92 | SOAT1 Sterol O-acyltransferase 1 | 4255 |
| Q14318_C274 | FKBP8 Peptidyl-prolyl cis-trans | 4256 |
| | isomerase FKBP8 | |
| Q14315_C2154 | FLNC Filamin-C | 4257 |
| P22234_C281 | PAICS Multifunctional protein ADE2 | 4258 |
| P22234_C423 | PAICS Multifunctional protein ADE2 | 4259 |
| Q969Z0_C370 | TBRG4 Protein TBRG4 | 4260 |
| Q8WUM4_C40 | PDCD6IP Programmed cell death 6- | 4261 |
| | interacting protein | |
| Q9H9A6_C264 | LRRC40 Leucine-rich repeat- | 4262 |
| | containing protein 40 | |
| P33764_C30 | S100A3 Protein S100-A3 | 4263 |
| P38936_C117 | CDKN1A Cyclin-dependent kinase | 4264 |
| | inhibitor 1 | |
| Q9UPU5_C1362 | USP24 Ubiquitin carboxyl-terminal | 4265 |
| | hydrolase 24 | |
| Q8IWD4_C81 | CCDC117 Coiled-coil domain- | 4266 |
| | containing protein 117 | |
| Q96GM8_C80 | TOE1 Target of EGR1 protein 1 | 4267 |
| Q9UJY4_C347 | GGA2 ADP-ribosylation factor-binding | 4268 |
| | protein GGA2 | |
| P12236_C129 | SLC25A6 ADP/ATP translocase 3 | 4269 |
| Q9NXH9_C620 | TRMT1 tRNA (guanine(26)-N(2))- | 4270 |
| | dimethyltransferase | |
| Q7L0Y3_C123 | TRMT10C Mitochondrial ribonuclease | 4271 |
| | P protein 1 | |
| Q08211_C12 | DHX9 ATP-dependent RNA helicase A | 4272 |
| Q9Y4I1_C535 | MYO5A Unconventional myosin-Va | 4273 |
| P08240_C253 | SRPR Signal recognition particle | 4274 |
| | receptor subunit alpha | |
| Q5TFE4_C399 | NT5DC1 5-nucleotidase domain- | 4275 |
| | containing protein 1 | |
| Q8NFW8_C364 | CMAS N-acylneuraminate | 4276 |
| | cytidylyltransferase | |
| O95817_C373 | BAG3 BAG family molecular | 4277 |
| | chaperone regulator 3 | |
| Q92541_C599 | RTF1 RNA polymerase-associated | 4278 |
| | protein RTF1 homolog | |
| P52789_C375 | HK2 Hexokinase-2 | 4279 |
| P52789_C813 | HK2 Hexokinase-2 | 4280 |
| Q01469_C87 | FABP5 Fatty acid-binding protein, | 4281 |
| | epidermal | |
| O43172_C342 | PRPF4 U4/U6 small nuclear | 4282 |
| | ribonucleoprotein Prp4 | |
| O43175_C48 | PHGDH D-3-phosphoglycerate | 4283 |
| | dehydrogenase | |
| O43175_C234 | PHGDH D-3-phosphoglycerate | 4284 |
| | dehydrogenase | |
| P22059_C344 | OSBP Oxysterol-binding protein 1 | 4285 |
| Q14699_C551 | RFTN1 Raftlin | 4286 |
| Q14697_C822 | GANAB Neutral alpha-glucosidase AB | 4287 |
| Q15654_C310 | TRIP6 Thyroid receptor-interacting | 4288 |
| | protein 6 | |
| Q15654_C328 | TRIP6 Thyroid receptor-interacting | 4289 |
| | protein 6 | |
| Q15652_C684 | JMJD1C Probable JmjC domain- | 4290 |
| | containing histone demethylation | |
| | protein 2C | |
| Q9NU22_C1867 | MDN1 Midasin | 4291 |
| Q13439_C1862 | GOLGA4 Golgin subfamily A member | 4292 |
| | 4 | |
| Q9UPT8_C1302 | ZC3H4 Zinc finger CCCH domain- | 4293 |
| | containing protein 4 | |
| Q9NXG2_C169 | THUMPD1 THUMP domain- | 4294 |
| | containing protein 1 | |
| Q27J81_C1029 | INF2 Inverted formin-2 | 4295 |
| P01892_C188 | HLA-A HLA class I histocompatibility | 4296 |
| | antigen, A-2 alpha | |
| P60903_C62 | S100A10 Protein S100-A10 | 4297 |
| P51553_C236 | IDH3G Isocitrate dehydrogenase | 4298 |
| P51003_C36 | PAPOLA Poly(A) polymerase alpha | 4299 |
| P50213_C351 | IDH3A Isocitrate dehydrogenase | 4300 |
| P62873_C204 | GNB1 Guanine nucleotide-binding | 4301 |
| | protein G(I)/G(S)/G(T) | |
| Q15003_C255 | NCAPH Condensin complex subunit 2 | 4302 |
| O00764_C273 | PDXK Pyridoxal kinase | 4303 |
| Q9BZL6_C217 | PRKD2 Serine/threonine-protein kinase | 4304 |
| | D2 | |
| O75534_C506 | CSDE1 Cold shock domain-containing | 4305 |
| | protein E1 | |
| Q9C0B1_C397 | FTO Alpha-ketoglutarate-dependent | 4306 |
| | dioxygenase FTO | |
| O75223_C42 | GGCT Gamma- | 4307 |
| | glutamylcyclotransferase | |
| Q13155_C168 | AIMP2 Aminoacyl tRNA synthase | 4308 |
| | complex-interacting multifunctional | |
| | protein 2 | |
| Q14204_C3389 | DYNC1H1 Cytoplasmic dynein 1 | 4309 |
| | heavy chain 1 | |
| Q8WXI9_C409 | GATAD2B Transcriptional repressor | 4310 |
| | p66-beta | |
| P07814_C1301 | EPRS Bifunctional glutamate/proline-- | 4311 |
| | tRNA ligase | |
| P22102_C62 | GART Trifunctional purine | 4312 |
| | biosynthetic protein adenosine | |
| O75643_C428 | SNRNP200 U5 small nuclear | 4313 |
| | ribonucleoprotein 200 kDa helicase | |
| Q9ULL5_C173 | PRR12 Proline-rich protein 12 | 4314 |
| Q14738_C484 | PPP2R5D Serine/threonine-protein | 4315 |
| | phosphatase 2A 56 kDa regulatory | |
| P50851_C1843 | LRBA Lipopolysaccharide-responsive | 4316 |
| | and beige-like anchor protein | |
| Q9H668_C8 | OBFC1 CST complex subunit STN1 | 4317 |
| Q15643_C1329 | TRIP11 Thyroid receptor-interacting | 4318 |
| | protein 11 | |
| Q13422_C394 | IKZF1 DNA-binding protein Ikaros | 4319 |
| P48739_C94 | PITPNB Phosphatidylinositol transfer | 4320 |
| | protein beta isoform | |
| Q9UJM3_C378 | ERRFI1 ERBB receptor feedback | 4321 |
| | inhibitor 1 | |
| P62136_C140 | PPP1CA Serine/threonine-protein | 4322 |
| | phosphatase PP1-alpha catalytic | |
| P13674_C528 | P4HA1 Prolyl 4-hydroxylase subunit | 4323 |
| | alpha-1 | |
| Q9NVX2_C280 | NLE1 Notchless protein homolog 1 | 4324 |
| Q6IA86_C68 | ELP2 Elongator complex protein 2 | 4325 |
| P45954_C308 | ACADSB Short/branched chain | 4326 |
| | specific acyl-CoA dehydrogenase | |
| O94921_C100 | CDK14 Cyclin-dependent kinase 14 | 4327 |
| Q3KQU3_C361 | MAP7D1 MAP7 domain-containing | 4328 |
| | protein 1 | |
| Q8IVM0_C85 | CCDC50 Coiled-coil domain- | 4329 |
| | containing protein 50 | |
| P52630_C74 | STAT2 Signal transducer and activator | 4330 |
| | of transcription 2 | |
| P52630_C529 | STAT2 Signal transducer and activator | 4331 |
| | of transcription 2 | |
| P42704_C571 | LRPPRC Leucine-rich PPR motif- | 4332 |
| | containing protein, mitochondrial | |
| P42704_C1043 | LRPPRC Leucine-rich PPR motif- | 4333 |
| | containing protein, mitocho | |
| Q99598_C202 | TSNAX Translin-associated protein X | 4334 |
| P34932_C376 | HSPA4 Heat shock 70 kDa protein 4 | 4335 |
| Q14980_C65 | NUMA1 Nuclear mitotic apparatus | 4336 |
| | protein 1 | |
| Q14980_C1367 | NUMA1 Nuclear mitotic apparatus | 4337 |
| | protein 1 | |
| Q9BYV8_C274 | CEP41 Centrosomal protein of 41 kDa | 4338 |
| P51970_C66 | NDUFA8 NADH dehydrogenase | 4339 |
| Q01433_C230 | AMPD2 AMP deaminase 2 | 4340 |
| P55212_C68 | CASP6 Caspase-6 | 4341 |
| Q5SW79_C235 | CEP170 Centrosomal protein of 170 | 4342 |
| | kDa | |
| Q9NQG5_C234 | RPRD1B Regulation of nuclear pre- | 4343 |
| | mRNA domain-containing protein | |
| O00743_C265 | PPP6C Serine/threonine-protein | 4344 |
| | phosphatase 6 catalytic subunit | |
| PI0515_C586 | DLAT Dihydrolipoyllysine-residue | 4345 |
| | acetyltransferase component of | |
| | pyruvate dehydrogenase complex, | |
| | mitochondiral | |
| P28340_C360 | POLD1 DNA polymerase delta | 4346 |
| | catalytic subunit | |
| P28340_C1029 | POLD1 DNA polymerase delta | 4347 |
| | catalytic subunit | |
| Q86VP6_C179 | CAND1 Cullin-associated NEDD8- | 4348 |
| | dissociated protein 1 | |
| Q86VP6_C954 | CAND1 Cullin-associated NEDD8- | 4349 |
| | dissociated protein 1 | |
| P54886_C486 | ALDH18A1 Delta-1-pyrroline-5- | 4350 |
| | carboxylate synthase | |
| P54886_C546 | ALDH18A1 Delta-l-pyrroline-5- | 4351 |
| | carboxylate synthase | |
| Q8N0X7_C288 | SPG20 Spartin | 4352 |
| Q8TB52_C723 | FBXO30 F-box only protein 30 | 4353 |
| Q14152_C404 | EIF3A Eukaryotic translation initiation | 4354 |
| | factor 3 subunit | |
| P21281_C112 | ATP6V1B2 V-type proton ATPase | 4355 |
| | subunit B, brain isoform | |
| P21281_C207 | ATP6V1B2 V-type proton ATPase | 4356 |
| | subunit B, brain isoform | |
| O75116_C804 | ROCK2 Rho-associated protein kinase | 4357 |
| | 2 | |
| Q5UIP0_C2169 | RIF1 Telomere-associated protein RIF1 | 4358 |
| Q9BW27_C515 | NUP85 Nuclear pore complex protein | 4359 |
| | Nup85 | |
| P55199_C70 | ELL RNA polymerase II elongation | 4360 |
| | factor ELL | |
| Q8WXE1_C74 | ATRIP ATR-interacting protein | 4361 |
| O14526_C571 | FCHO1 FCH domain only protein 1 | 4362 |
| Q9NSD9_C362 | FARSB Phenylalanine--tRNA ligase | 4363 |
| | beta subunit | |
| Q8WUW1_C43 | BRK1 Protein BRICK1 | 4364 |
| Q12874_C145 | SF3A3 Splicing factor 3A subunit 3 | 4365 |
| Q9Y6A5_C20 | TACC3 Transforming acidic coiled- | 4366 |
| | coil-containing protein | |
| Q9Y6A5_C426 | TACC3 Transforming acidic coiled- | 4367 |
| | coil-containing protein | |
| Q92878_C133 | RAD50 DNA repair protein RAD50 | 4368 |
| Q9BXK1_C233 | KLF16 Krueppel-like factor 16 | 4369 |
| Q68CZ2_C842 | TNS3 Tensin-3 | 4370 |
| O75616_C86 | ERAL1 GTPase Era, mitochondrial | 4371 |
| P18031_C32 | PTPN1 Tyrosine-protein phosphatase | 4372 |
| | non-receptor type 1 | |
| Q9UHB6_C316 | LIMA1 LIM domain and actin-binding | 4373 |
| | protein 1 | |
| Q9UHB6_C414 | LIMA1 LIM domain and actin-binding | 4374 |
| | protein 1 | |
| Q9NZ52_C396 | GGA3 ADP-ribosylation factor-binding | 4375 |
| | protein GGA3 | |
| Q9UBT2_C185 | UBA2 SUMO-activating enzyme | 4376 |
| | subunit 2 | |
| Q15723_C470 | ELF2 ETS-related transcription factor | 4377 |
| | Elf-2 | |
| Q9H5V9_C11 | CXorf56 UPF0428 protein CXorf56 | 4378 |
| O14980_C199 | XPO1 Exportin-1 | 4379 |
| P15104_C53 | GLUL Glutamine synthetase | 4380 |
| P13796_C206 | LCP1 Plastin-2 | 4381 |
| O95071_C2084 | UBR5 E3 ubiquitin-protein ligase | 4382 |
| | UBR5 | |
| Q6XZF7_C909 | DNMBP Dynamin-binding protein | 4383 |
| Q9NXR7_C34 | BRE BRCA1-A complex subunit BRE | 4384 |
| Q9NQW6_C61 | ANLN Actin-binding protein anillin | 4385 |
| Q9NQW6_C234 | ANLN Actin-binding protein anillin | 4386 |
| Q6P587_C129 | FAHD1 Acylpyruvase FAHD1, | 4387 |
| | mitochondrial | |
| Q8NC96_C162 | NECAP1 Adaptin ear-binding coat- | 4388 |
| | associated protein 1 | |
| Q00653_C738 | NFKB2 Nuclear factor NF-kappa-B | 4389 |
| | p100 subunit | |
| Q86W56_C603 | PARG Poly(ADP-ribose) | 4390 |
| | glycohydrolase | |
| P39748_C182 | FEN1 Flap endonuclease 1 | 4391 |
| Q9Y3Z3_C320 | SAMHD1 SAM domain and HD | 4392 |
| | domain-containing protein 1 | |
| Q13045_C1265 | FLH Protein flightless-1 homolog | 4393 |
| Q14558_C19 | PRPSAP1 Phosphoribosyl | 4394 |
| | pyrophosphate synthase-associated | |
| | protein 1 | |
| O75592_C3152 | MYCBP2 Probable E3 ubiquitin- | 4395 |
| | protein ligase MYCBP2 | |
| Q8IUR0_C40 | TRAPPC5 Trafficking protein particle | 4396 |
| | complex subunit 5 | |
| Q16822_C92 | PCK2 Phosphoenolpyruvate | 4397 |
| | carboxykinase | |
| Q53H96_C129 | PYCRL Pyrroline-5-carboxylate | 4398 |
| | reductase 3 | |
| Q96F24_C126 | NRBF2 Nuclear receptor-binding factor | 4399 |
| | 2 | |
| H3BQ06_C89 | Uncharacterized protein | 4400 |
| Q06546_C421 | GABPA GA-binding protein alpha | 4401 |
| | chain | |
| P56192_C309 | MARS Methionine--tRNA ligase, | 4402 |
| | cytoplasmic | |
| Q9Y485_C1419 | DMXL1 DmX-like protein 1 | 4403 |
| Q00839_C408 | HNRNPU Heterogeneous nuclear | 4404 |
| | ribonucleoprotein U | |
| Q92499_C631 | DDX1 ATP-dependent RNA helicase | 4405 |
| | DDX1 | |
| O43663_C531 | PRC1 Protein regulator of cytokinesis 1 | 4406 |
| O14879_C239 | IFIT3 Interferon-induced protein with | 4407 |
| | tetratricopeptide | |
| P36969_C134 | GPX4 Phospholipid hydroperoxide | 4408 |
| | glutathione peroxidase, | |
| P12081_C235 | HARS Histidine--tRNA ligase, | 4409 |
| | cytoplasmic | |
| P50914_C54 | RPL14 60S ribosomal protein L14 | 4410 |
| Q9H0D6_C547 | XRN2 5-3 exoribonuclease 2 | 4411 |
| Q14C86_C1129 | GAPVD1 GTPase-activating protein | 4412 |
| | and VPS9 domain-containi | |
| Q9BXF6_C106 | RAB11FIP5 Rab11 family-interacting | 4413 |
| | protein 5 | |
| A6NHR9_C1856 | SMCHD1 Structural maintenance of | 4414 |
| | chromosomes flexible hin | |
| Q9BW92_C322 | TARS2 Threonine--tRNA ligase, | 4415 |
| | mitochondrial | |
| P83916_C156 | CBX1 Chromobox protein homolog 1 | 4416 |
| O00410_C229 | IPO5 Importin-5 | 4417 |
| Q5VUA4_C1681 | ZNF318 Zinc finger protein 318 | 4418 |
| Q96SY0_C193 | C15orf44 UPF0464 protein C15orf44 | 4419 |
| Q9NS18_C77 | GLRX2 Glutaredoxin-2, mitochondrial | 4420 |
| P46109_C44 | CRKL Crk-like protein | 4421 |
| Q14289_C677 | PTK2B Protein-tyrosine kinase 2-beta | 4422 |
| Q14289_C972 | PTK2B Protein-tyrosine kinase 2-beta | 4423 |
| O75718_C317 | CRTAP Cartilage-associated protein | 4424 |
| Q86Y37_C94 | CACUL1 CDK2-associated and cullin | 4425 |
| | domain-containing protein | |
| P16144_C1553 | ITGB4 Integrin beta-4 | 4426 |
| Q9BY42_C51 | C20orf43 UPF0549 protein C20orf43 | 4427 |
| Q8ND56_C375 | LSM14A Protein LSM14 homolog A | 4428 |
| P40121_C165 | CAPG Macrophage-capping protein | 4429 |
| P78347_C745 | GTF2I General transcription factor II-I | 4430 |
| P78347_C903 | GTF2I General transcription factor II-I | 4431 |
| P16885_C496 | PLCG2 1-phosphatidylinositol 4,5- | 4432 |
| | bisphosphate phosphodiese | |
| Q9H814_C87 | PHAX Phosphorylated adapter RNA | 4433 |
| | export protein | |
| P29401_C41 | TKT Transketolase | 4434 |
| P35249_C141 | RFC4 Replication factor C subunit 4 | 4435 |
| Q92835_C956 | INPP5D Phosphatidylinositol 3,4,5- | 4436 |
| | trisphosphate 5-phosphatase | |
| Q9Y6E0_C375 | STK24 Serine/threonine-protein kinase | 4437 |
| | 24 | |
| O75380_C87 | NDUFS6 NADH dehydrogenase | 4438 |
| Q9Y4G6_C1954 | TLN2 Talin-2 | 4439 |
| Q9NYG5_C7 | ANAPC11 Anaphase-promoting | 4440 |
| | complex subunit 11 | |
| Q9UPN3_C5131 | MACF1 Microtubule-actin cross- | 4441 |
| | linking factor 1, isoforms | |
| P53634_C448 | CTSC Dipeptidyl peptidase 1 | 4442 |
| Q96HA7_C830 | TONSL Tonsoku-like protein | 4443 |
| A5YKK6_C677 | CNOT1 CCR4-NOT transcription | 4444 |
| | complex subunit 1 | |
| Q9BWU0_C125 | SLC4A1AP Kanadaptin | 4445 |
| Q9BWU0_C730 | SLC4A1AP Kanadaptin | 4446 |
| P40763_C718 | STAT3 Signal transducer and activator | 4447 |
| | of transcription 3 | |
| Q96RU3_C555 | FNBP1 Formin-binding protein 1 | 4448 |
| Q96HS1_C168 | PGAM5 Serine/threonine-protein | 4449 |
| | phosphatase PGAM5, mitochondrial | |
| Q6YN16_C136 | HSDL2 Hydroxysteroid | 4450 |
| | dehydrogenase-like protein 2 | |
| P05067_C98 | APP Amyloid beta A4 protein | 4451 |
| Q96RE7_C85 | NACC1 Nucleus accumbens-associated | 4452 |
| | protein 1 | |
| P49959_C336 | MRE11A Double-strand break repair | 4453 |
| | protein MRE11A | |
| Q01813_C232 | PFKP 6-phosphofructokinase type C | 4454 |
| P49792_C348 | RANBP2 E3 SUMO-protein ligase | 4455 |
| | RanBP2 | |
| P49792_C1296 | RANBP2 E3 SUMO-protein ligase | 4456 |
| | RanBP2 | |
| Q93008_C1566 | USP9X Probable ubiquitin carboxyl- | 4457 |
| | terminal hydrolase FAF | |
| Q9BY89_C817 | KIAA1671 Uncharacterized protein | 4458 |
| | KIAA1671 | |
| Q5SRE5_C1445 | NUP188 Nucleoporin NUP188 | 4459 |
| | homolog | |
| Q92665_C356 | MRPS31 28S ribosomal protein S31, | 4460 |
| | mitochondrial | |
| P18669_C55 | PGAM1 Phosphoglycerate mutase 1 | 4461 |
| Q9Y4P8_C70 | WIPI2 WD repeat domain | 4462 |
| | phosphoinositide-interacting protein | |
| Q9Y4P1_C189 | ATG4B Cysteine protease ATG4B | 4463 |
| Q9BZD4_C285 | NUF2 Kinetochore protein Nuf2 | 4464 |
| Q01581_C406 | HMGCS1 Hydroxymethylglutaryl-CoA | 4465 |
| | synthase, cytoplasmic | |
| P78344_C677 | EIF4G2 Eukaryotic translation | 4466 |
| | initiation factor 4 gamma 2 | |
| Q92609_C753 | TBC1D5 TBC1 domain family member | 4467 |
| | 5 | |
| Q9BSJ8_C890 | ESYT1 Extended synaptotagmin-1 | 4468 |
| P46013_C226 | MKI67 Antigen KI-67 | 4469 |
| P46013_C1373 | MKI67 Antigen KI-67 | 4470 |
| P46013_C1479 | MKI67 Antigen KI-67 | 4471 |
| P17858_C708 | PFKL 6-phosphofructokinase, liver | 4472 |
| | type | |
| Q96PK6_C31 | RBM14 RNA-binding protein 14 | 4473 |
| P53602_C133 | MVD Diphosphomevalonate | 4474 |
| | decarboxylase | |
| Q8WXH0_C1032 | SYNE2 Nesprin-2 | 4475 |
| Q14137_C108 | BOP1 Ribosome biogenesis protein | 4476 |
| | BOP1 | |
| P23368_C481 | ME2 NAD-dependent malic enzyme, | 4477 |
| | mitochondrial | |
| P51692_C688 | STAT5B Signal transducer and | 4478 |
| | activator of transcription 5 | |
| Q8TD19_C890 | NEK9 Serine/threonine-protein kinase | 4479 |
| | Nek9 | |
| Q14008_C1113 | CKAP5 Cytoskeleton-associated | 4480 |
| | protein 5 | |
| Q14008_C1946 | CKAP5 Cytoskeleton-associated | 4481 |
| | protein 5 | |
| Q9UJU6_C67 | DBNL Drebrin-like protein | 4482 |
| Q9UPQ0_C182 | LIMCH1 LIM and calponin homology | 4483 |
| | domains-containing protein | |
| Q15424_C362 | SAFB Scaffold attachment factor B1 | 4484 |
| O95757_C290 | HSPA4L Heat shock 70 kDa protein 4L | 4485 |
| P21333_C623 | FLNA Filamin-A | 4486 |
| P51610_C326 | HCFC1 Host cell factor 1 | 4487 |
| Q9H6E5_C501 | TUT1 Speckle targeted PIP5K1A- | 4488 |
| | regulated poly(A) polymer | |
| O00154_C100 | ACOT7 Cytosolic acyl coenzyme A | 4489 |
| | thioester hydrolase | |
| O95347_C800 | SMC2 Structural maintenance of | 4490 |
| | chromosomes protein 2 | |
| Q96SZ5_C239 | ADO 2-aminoethanethiol dioxygenase | 4491 |
| P18615_C297 | RDBP Negative elongation factor E | 4492 |
| Q93034_C112 | CUL5 Cullin-5 | 4493 |
| O43913_C171 | ORC5 Origin recognition complex | 4494 |
| | subunit 5 | |
| P01033_C189 | TIMP1 Metalloproteinase inhibitor 1 | 4495 |
| Q92616_C1362 | GCN1L1 Translational activator GCN1 | 4496 |
| Q92616_C1781 | GCN1L1 Translational activator GCN1 | 4497 |
| Q99661_C154 | KIF2C Kinesin-like protein KIF2C | 4498 |
| O60701_C196 | UGDH UDP-glucose 6-dehydrogenase | 4499 |
| Q9UH65_C279 | SWAP70 Switch-associated protein 70 | 4500 |
| Q96FS4_C446 | SIPA1 Signal-induced proliferation- | 4501 |
| | associated protein 1 | |
| P49327_C1186 | FASN Fatty acid synthase | 4502 |
| P49327_C1759 | FASN Fatty acid synthase | 4503 |
| P49327_C2292 | FASN Fatty acid synthase | 4504 |
| Q05655_C280 | PRKCD Protein kinase C delta type | 4505 |
| Q05655_C344 | PRKCD Protein kinase C delta type | 4506 |
| Q9BQE9_C189 | BCL7B B-cell CLL/lymphoma 7 | 4507 |
| | protein family member B | |
| Q8N1G0_C91 | ZNF687 Zinc finger protein 687 | 4508 |
| P13489_C45 | RNH1 Ribonuclease inhibitor | 4509 |
| P48444_C479 | ARCN1 Coatomer subunit delta | 4510 |
| Q96BN8_C129 | FAM105B Protein FAM105B | 4511 |
| Q9UKU7_C159 | ACAD8 Isobutyryl-CoA | 4512 |
| | dehydrogenase, mitochondrial | |
| Q9H2L5_C249 | RASSF4 Ras association domain- | 4513 |
| | containing protein 4 | |
| Q12888_0178 | TP53BP1 Tumor suppressor p53- | 4514 |
| | binding protein 1 | |
| P29034_C94 | S100A2 Protein S100-A2 | 4515 |
| Q9UQ35_C785 | SRRM2 Serine/arginine repetitive | 4516 |
| | matrix protein 2 | |
| O00329_C474 | PIK3CD Phosphatidylinositol 4,5- | 4517 |
| | bisphosphate 3-kinase catalytic | |
| Q9Y2Y0_C149 | ARL2BP ADP-ribosylation factor-like | 4518 |
| | protein 2-binding protein | |
| O15357_C1121 | INPPL1 Phosphatidylinositol 3,4,5- | 4519 |
| | trisphosphate 5-phosphatase 2 | |
| Q99832_C345 | CCT7 T-complex protein 1 subunit eta | 4520 |
| Q9Y4D8_C1370 | HECTD4 Probable E3 ubiquitin-protein | 4521 |
| | ligase HECTD4 | |
| Q6KC79_C419 | NIPBL Nipped-B-like protein | 4522 |
| P04179_C164 | SOD2 Superoxide dismutase | 4523 |
| Q96RG2_C15 | PASK PAS domain-containing | 4524 |
| | serine/threonine-protein kinase | |
| Q14061_C24 | COX17 Cytochrome c oxidase copper | 4525 |
| | chaperone | |
| Q96DC7_C14 | TMCO6 Transmembrane and coiled- | 4526 |
| | coil domain-containing protein | |
| P20248_C327 | CCNA2 Cyclin-A2 | 4527 |
| Q02878_C44 | RPL6 60S ribosomal protein L6 | 4528 |
| O14773_C365 | TPP1 Tripeptidyl-peptidase 1 | 4529 |
| P61086_C92 | UBE2K Ubiquitin-conjugating enzyme | 4530 |
| | E2 K | |
| P31146_C332 | CORO1A Coronin-1A | 4531 |
| Q9BR76_C153 | CORO1B Coronin-1B | 4532 |
| Q96QC0_C463 | PPP1R10 Serine/threonine-protein | 4533 |
| | phosphatase 1 regulatory | |
| Q5VT52_C1071 | RPRD2 Regulation of nuclear pre- | 4534 |
| | mRNA domain-containing p | |
| P78527_C373 | PRKDC DNA-dependent protein kinase | 4535 |
| | catalytic subunit | |
| Q96A35_C58 | MRPL24 39S ribosomal protein L24, | 4536 |
| | mitochondrial | |
| Q14498_C303 | RBM39 RNA-binding protein 39 | 4537 |
| Q8N556_C157 | AFAP1 Actin filament-associated | 4538 |
| | protein 1 | |
| Q68CP9_C711 | ARID2 AT-rich interactive domain- | 4539 |
| | containing protein 2 | |
| Q9H3U1_C663 | UNC45A Protein unc-45 homolog A | 4540 |
| Q99567_C595 | NUP88 Nuclear pore complex protein | 4541 |
| | Nup88 | |
| Q14789_C1713 | GOLGB1 Golgin subfamily B member | 4542 |
| | 1 | |
| P20810_C661 | CAST Calpastatin | 4543 |
| P07203_C115 | GPX1 Glutathione peroxidase 1 | 4544 |
| O60216_C35 | RAD21 Double-strand-break repair | 4545 |
| | protein rad21 homolog | |
| O60216_C513 | RAD21 Double-strand-break repair | 4546 |
| | protein rad21 homolog | |
| Q9ULV4_C190 | CORO1C Coronin-1C | 4547 |
| P30153_C174 | PPP2R1A Serine/threonine-protein | 4548 |
| | phosphatase 2A 65 kDa regulatory | |
| | subunit A | |
| P30153_C329 | PPP2R1A Serine/threonine-protein | 4549 |
| | phosphatase 2A 65 kDa regulatory | |
| | subunit A | |
| Q9UEW8_C99 | STK39 STE20/SPS1-related proline- | 4550 |
| | alanine-rich protein kinase | |
| Q13574_C265 | DGKZ Diacylglycerol kinase zeta | 4551 |
| O00233_C216 | PSMD9 26S proteasome non-ATPase | 4552 |
| | regulatory subunit 9 | |
| P05023_C705 | ATP1A1 Sodium/potassium- | 4553 |
| | transporting ATPase subunit alpha | |
| P45985_C266 | MAP2K4 Dual specificity mitogen- | 4554 |
| | activated protein kinase | |
| P45983_C245 | MAPK8 Mitogen-activated protein | 4555 |
| | kinase 8 | |
| Q9P2R7_C320 | SUCLA2 Succinyl-CoA ligase | 4556 |
| P31040_C89 | SDHA Succinate dehydrogenase | 4557 |
| O76071_C234 | CIAO1 Probable cytosolic iron-sulfur | 4558 |
| | protein assembly protein CIAO1 | |
| O95372_C56 | LYPLA2 Acyl-protein thioesterase 2 | 4559 |
| Q04864_C524 | REL Proto-oncogene c-Rel | 4560 |
| Q96CD2_C173 | PPCDC Phosphopantothenoylcysteine | 4561 |
| | decarboxylase | |
| A6NC98_C1222 | CCDC88B Coiled-coil domain- | 4562 |
| | containing protein 88B | |
| Q10570_C1020 | CPSF1 Cleavage and polyadenylation | 4563 |
| | specificity factor subunit 1 | |
| P43378_C506 | PTPN9 Tyrosine-protein phosphatase | 4564 |
| | non-receptor type 9 | |
| Q15021_C816 | NCAPD2 Condensin complex subunit 1 | 4565 |
| Q8TEW0_C6 | PARD3 Partitioning defective 3 | 4566 |
| | homolog | |
| O94925_C500 | GLS Glutaminase kidney isoform, | 4567 |
| | mitochondrial | |
| Q9Y3B8_C137 | REXO2 Oligoribonuclease, | 4568 |
| | mitochondrial | |
| Q96LD4_C347 | TRIM47 Tripartite motif-containing | 4569 |
| | protein 47 | |
| Q9H081_C104 | MIS12 Protein MIS12 homolog | 4570 |
| P54687_C293 | BCAT1 Branched-chain-amino-acid | 4571 |
| | aminotransferase, cytosol | |
| Q8WUM4_C524 | PDCD6IP Programmed cell death 6- | 4572 |
| | interacting protein | |
| Q8WUM4_C691 | PDCD6IP Programmed cell death 6- | 4573 |
| | interacting protein | |
| Q9H9A7_C366 | RMI1 RecQ-mediated genome | 4574 |
| | instability protein 1 | |
| Q13315_C2021 | ATM Serine-protein kinase ATM | 4575 |
| P11766_C174 | ADH5 Alcohol dehydrogenase class-3 | 4576 |
| Q96EI5_C34 | TCEAL4 Transcription elongation | 4577 |
| | factor A protein-like 4 | |
| Q9NR45_C184 | NANS Sialic acid synthase | 4578 |
| Q13542_C35 | EIF4EBP2 Eukaryotic translation | 4579 |
| | initiation factor 4E-binding | |
| Q13547_C151 | HDAC1 Histone deacetylase 1 | 4580 |
| Q8NF50_C939 | DOCK8 Dedicator of cytokinesis | 4581 |
| | protein 8 | |
| P09110_C218 | ACAA1 3-ketoacyl-CoA thiolase, | 4582 |
| | peroxisomal | |
| O60841_C749 | EIF5B Eukaryotic translation initiation | 4583 |
| | factor 5B | |
| Q15306_C223 | IRF4 Interferon regulatory factor 4 | 4584 |
| Q96S59_C513 | RANBP9 Ran-binding protein 9 | 4585 |
| O60443_C180 | DFNA5 Non-syndromic hearing | 4586 |
| | impairment protein 5 | |
| P08240_C621 | SRPR Signal recognition particle | 4587 |
| | receptor subunit alpha | |
| Q9NRR5_C29 | UBQLN4 Ubiquilin-4 | 4588 |
| Q92769_C274 | HDAC2 Histone deacetylase 2 | 4589 |
| O43823_C85 | AKAP8 A-kinase anchor protein 8 | 4590 |
| Q9Y3C7_C93 | MED31 Mediator of RNA polymerase | 4591 |
| | II transcription subunit | |
| Q7Z7A3_C210 | CTU1 Cytoplasmic tRNA 2-thiolation | 4592 |
| | protein 1 | |
| Q14696_C180 | MESDC2 LDLR chaperone MESD | 4593 |
| P19367_C628 | HK1 Hexokinase-1 | 4594 |
| Q13557_C373 | CAMK2D Calcium/calmodulin- | 4595 |
| | dependent protein kinase type I | |
| Q9HB71_C154 | CACYBP Calcyclin-binding protein | 4596 |
| O00148_C299 | DDX39A ATP-dependent RNA | 4597 |
| | helicase DDX39A | |
| Q9BW19_C509 | KIFC1 Kinesin-like protein KIFC1 | 4598 |
| P48643_C440 | CCT5 T-complex protein 1 subunit | 4599 |
| | epsilon | |
| Q03164_C2841 | MLL Histone-lysine N- | 4600 |
| | methyltransferase MLL | |
| Q9H0L4_C441 | CSTF2T Cleavage stimulation factor | 4601 |
| | subunit 2 tau variant | |
| P51553_C148 | IDH3G Isocitrate dehydrogenase | 4602 |
| Q9Y678_C813 | COPG1 Coatomer subunit gamma-1 | 4603 |
| Q9UBB4_C405 | ATXN10 Ataxin-10 | 4604 |
| Q9C0C2_C1114 | TNKS1BP1 182 kDa tankyrase-1- | 4605 |
| | binding protein | |
| Q9C0C2_C1175 | TNKS1BP1 182 kDa tankyrase-1- | 4606 |
| | binding protein | |
| P09651_C43 | HNRNPA1 Heterogeneous nuclear | 4607 |
| | ribonucleoprotein A1 | |
| Q96R06_C307 | SPAG5 Sperm-associated antigen 5 | 4608 |
| Q8NFH8_C380 | REPS2 RalBP1-associated Eps domain- | 4609 |
| | containing protein 2 | |
| Q14204_C3325 | DYNC1H1 Cytoplasmic dynein 1 | 4610 |
| | heavy chain 1 | |
| Q14204_C4121 | DYNC1H1 Cytoplasmic dynein 1 | 4611 |
| | heavy chain 1 | |
| O75643_C502 | SNRNP200 U5 small nuclear | 4612 |
| | ribonucleoprotein 200 kDa helicas | |
| O75643_C516 | SNRNP200 U5 small nuclear | 4613 |
| | ribonucleoprotein 200 kDa helicas | |
| Q13085_C1297 | ACACA Acetyl-CoA carboxylase 1 | 4614 |
| P04049_C27 | RAF1 RAF proto-oncogene | 4615 |
| | serine/threonine-protein kinase | |
| Q53T59_C287 | HS1BP3 HCLS 1-binding protein 3 | 4616 |
| P60468_C39 | SEC61B Protein transport protein | 4617 |
| | Sec61 subunit beta | |
| Q15019_C114 | SEPT2 Septin-2 | 4618 |
| Q15643_C1299 | TRIP11 Thyroid receptor-interacting | 4619 |
| | protein 11 | |
| Q13541_C62 | EIF4EBP1 Eukaryotic translation | 4620 |
| | initiation factor 4E-binding | |
| Q9HD42_C44 | CHMP1A Charged multivesicular body | 4621 |
| | protein 1a | |
| O15371_C327 | EIF3D Eukaryotic translation initiation | 4622 |
| | factor 3 subunit | |
| Q06187_C337 | BTK Tyrosine-protein kinase BTK | 4623 |
| P55060_C344 | CSE1L Exportin-2 | 4624 |
| Q8IUD2_C1101 | ERC1 ELKS/Rab6-interacting/CAST | 4625 |
| | family member 1 | |
| Q9UBE0_C342 | SAE1 SUMO-activating enzyme | 4626 |
| | subunit 1 | |
| Q13459_C2028 | MYO9B Unconventional myosin-IXb | 4627 |
| P41236_C86 | PPP1R2 Protein phosphatase inhibitor 2 | 4628 |
| Q6IA86_C746 | ELP2 Elongator complex protein 2 | 4629 |
| O75815_C449 | BCAR3 Breast cancer anti-estrogen | 4630 |
| | resistance protein 3 | |
| Q08J23_C599 | NSUN2 tRNA (cytosine(34)-C(5))- | 4631 |
| | methyltransferase | |
| O15231_C466 | ZNF185 Zinc finger protein 185 | 4632 |
| Q8TF05_C566 | PPP4R1 Serine/threonine-protein | 4633 |
| | phosphatase 4 regulatory | |
| Q86VQ1_C151 | GLCCI1 Glucocorticoid-induced | 4634 |
| | transcript 1 protein | |
| Q66K14_C839 | TBC1D9B TBC1 domain family | 4635 |
| | member 9B | |
| O75676_C257 | RPS6KA4 Ribosomal protein S6 kinase | 4636 |
| | alpha-4 | |
| Q01082_C2227 | SPTBN1 Spectrin beta chain, non- | 4637 |
| | erythrocytic 1 | |
| P61812_C89 | TGFB2 Transforming growth factor | 4638 |
| | beta-2 | |
| P42704_C927 | LRPPRC Leucine-rich PPR motif- | 4639 |
| | containing protein, mitochondrial | |
| Q02218_C604 | OGDH 2-oxoglutarate dehydrogenase, | 4640 |
| | mitochondrial | |
| Q99594_C368 | TEAD3 Transcriptional enhancer factor | 4641 |
| | TEF-5 | |
| P42858_C1961 | HTT Huntingtin | 4642 |
| P42858_C2971 | HTT Huntingtin | 4643 |
| P82675_C211 | MRPS5 28S ribosomal protein S5, | 4644 |
| | mitochondrial | |
| P21291_C25 | CSRP1 Cysteine and glycine-rich | 4645 |
| | protein 1 | |
| O43447_C131 | PPIH Peptidyl-prolyl cis-trans | 4646 |
| | isomerase H | |
| Q9UBR2_C132 | CTSZ Cathepsin Z | 4647 |
| P31939_C101 | ATIC Bifunctional purine biosynthesis | 4648 |
| | protein PURH | |
| Q9P2E9_C1128 | RRBP1 Ribosome-binding protein 1 | 4649 |
| Q9NWU1_C209 | OXSM 3-oxoacyl-ACP synthase, | 4650 |
| | mitochondrial | |
| O95059_C78 | RPP14 Ribonuclease P protein subunit | 4651 |
| | p14 | |
| P51570_C322 | GALK1 Galactokinase | 4652 |
| P28340_C1076 | POLD1 DNA polymerase delta | 4653 |
| | catalytic subunit | |
| Q7Z5L9_C555 | IRF2BP2 Interferon regulatory factor 2- | 4654 |
| | binding protein 2 | |
| P54886_C161 | ALDH18A1 Delta-1-pyrroline-5- | 4655 |
| | carboxylate synthase | |
| P17987_C236 | TCP1 T-complex protein 1 subunit | 4656 |
| | alpha | |
| O43143_C774 | DHX15 Putative pre-mRNA-splicing | 4657 |
| | factor ATP-dependent RN | |
| P67775_C251 | PPP2CA Serine/threonine-protein | 4658 |
| | phosphatase 2A catalytic | |
| Q92667_C102 | AKAP1 A-kinase anchor protein 1, | 4659 |
| | mitochondrial | |
| Q99615_C116 | DNAJC7 DnaJ homolog subfamily C | 4660 |
| | member 7 | |
| P04062_C165 | GBA Glucosylceramidase | 4661 |
| Q96P11_C308 | NSUN5 Putative methyltransferase | 4662 |
| | NSUN5 | |
| Q86X02_C160 | CDR2L Cerebellar degeneration-related | 4663 |
| | protein 2-like | |
| P16035_C159 | TIMP2 Metalloproteinase inhibitor 2 | 4664 |
| Q52LW3_C793 | ARHGAP29 Rho GTPase-activating | 4665 |
| | protein 29 | |
| H3BQZ7_C538 | Uncharacterized protein | 4666 |
| Q9BQ90_C213 | KLHDC3 Kelch domain-containing | 4667 |
| | protein 3 | |
| P13797_C167 | PLS3 Plastin-3 | 4668 |
| Q06210_C620 | GFPT1 Glucosamine--fructose-6- | 4669 |
| | phosphate aminotransferase | |
| Q7L576_C98 | CYFIP1 Cytoplasmic FMR1-interacting | 4670 |
| | protein 1 | |
| Q7L576_C1241 | CYFIP1 Cytoplasmic FMRI-interacting | 4671 |
| | protein 1 | |
| Q03001_C5056 | DST Dystonin | 4672 |
| Q03001_C5394 | DST Dystonin | 4673 |
| Q9UFW8_C92 | CGGBP1 CGG triplet repeat-binding | 4674 |
| | protein 1 | |
| P49721_C163 | PSMB2 Proteasome subunit beta type-2 | 4675 |
| Q96I51_C329 | WBSCR16 Williams-Beuren syndrome | 4676 |
| | chromosomal region 16 protein | |
| O60884_C280 | DNAJA2 DnaJ homolog subfamily A | 4677 |
| | member 2 | |
| O60884_C308 | DNAJA2 DnaJ homolog subfamily A | 4678 |
| | member 2 | |
| Q9BV19_C189 | C1orf50 Uncharacterized protein | 4679 |
| | C1orf50 | |
| P29353_C248 | SHC1 SHC-transforming protein 1 | 4680 |
| Q7Z4Q2_C57 | HEATR3 HEAT repeat-containing | 4681 |
| | protein 3 | |
| O75376_C2403 | NCOR1 Nuclear receptor corepressor 1 | 4682 |
| Q9Y6A5_C293 | TACC3 Transforming acidic coiled- | 4683 |
| | coil-containing protein | |
| P31323_C149 | PRKAR2B cAMP-dependent protein | 4684 |
| | kinase type II-beta regulatory subunit | |
| | beta | |
| Q15120_C41 | PDK3 | 4685 |
| P05455_C18 | SSB Lupus La protein | 4686 |
| Q08257_C166 | CRYZ Quinone oxidoreductase | 4687 |
| P54278_C216 | PMS2 Mismatch repair endonuclease | 4688 |
| | PMS2 | |
| P05534_C363 | HLA-A HLA class I histocompatibility | 4689 |
| | antigen, A-24 alpha | |
| Q96P16_C100 | RPRD1A Regulation of nuclear pre- | 4690 |
| | mRNA domain-containing protein | |
| Q9NWK9_C211 | ZNHIT6 Box C/D snoRNA protein 1 | 4691 |
| Q9BZF9_C408 | UACA Uveal autoantigen with coiled- | 4692 |
| | coil domains and ankyrin repeats | |
| P57081_C412 | WDR4 tRNA (guanine-N(7)-)- | 4693 |
| | methyltransferase subunit WDR | |
| Q9H4L7_C861 | SMARCAD1 SWI/SNF-related matrix- | 4694 |
| | associated actin-dependent | |
| Q14149_C671 | MORC3 MORC family CW-type zinc | 4695 |
| | finger protein 3 | |
| Q8WUA7_C151 | TBC1D22A TBC1 domain family | 4696 |
| | member 22A | |
| Q2T9J0_C284 | TYSND1 Peroxisomal leader peptide- | 4697 |
| | processing protease | |
| Q96C86_C37 | DCPS m7GpppX diphosphatase | 4698 |
| P30084_C143 | ECHS1 Enoyl-CoA hydratase, | 4699 |
| | mitochondrial | |
| Q29RF7_C1093 | PDS5A Sister chromatid cohesion | 4700 |
| | protein PDS5 homolog A | |
| O15111_C30 | CHUK Inhibitor of nuclear factor | 4701 |
| | kappa-B kinase subunit | |
| Q9H7B4_C238 | SMYD3 SET and MYND domain- | 4702 |
| | containing protein 3 | |
| Q8TDX7_C53 | NEK7 Serine/threonine-protein kinase | 4703 |
| | Nek7 | |
| Q8TDX7_C298 | NEK7 Serine/threonine-protein kinase | 4704 |
| | Nek7 | |
| Q86W56_C155 | PARG Poly(ADP-ribose) | 4705 |
| | glycohydrolase | |
| P43246_C199 | MSH2 DNA mismatch repair protein | 4706 |
| | Msh2 | |
| P28702_C340 | RXRB Retinoic acid receptor RXR-beta | 4707 |
| Q13283_C73 | G3BP1 Ras GTPase-activating protein- | 4708 |
| | binding protein 1 | |
| O75608_C173 | LYPLA1 Acyl-protein thioesterase 1 | 4709 |
| P23497_C248 | SP100 Nuclear autoantigen Sp-100 | 4710 |
| Q8WX92_C115 | COBRA1 Negative elongation factor B | 4711 |
| O75044_C820 | SRGAP2 SLIT-ROBO Rho GTPase- | 4712 |
| | activating protein 2 | |
| Q13464_C1206 | ROCK1 Rho-associated protein kinase | 4713 |
| | 1 | |
| O96013_C58 | PAK4 Serine/threonine-protein kinase | 4714 |
| | PAK 4 | |
| P15056_C748 | BRAF Serine/threonine-protein kinase | 4715 |
| | B-raf | |
| Q16762_C248 | TST Thiosulfate sulfurtransferase | 4716 |
| P05198_C218 | EIF2S1 Eukaryotic translation initiation | 4717 |
| | factor 2 subunit | |
| P15374_C209 | UCHL3 Ubiquitin carboxyl-terminal | 4718 |
| | hydrolase isozyme L3 | |
| Q9NZN4_C356 | EHD2 EH domain-containing protein 2 | 4719 |
| Q9NZN8_C175 | CNOT2 CCR4-NOT transcription | 4720 |
| | complex subunit 2 | |
| P52294_C529 | KPNA1 Importin subunit alpha-1 | 4721 |
| O76003_C46 | GLRX3 Glutaredoxin-3 | 4722 |
| P35914_C307 | HMGCL Hydroxymethylglutaryl-CoA | 4723 |
| | lyase, mitochondrial | |
| Q00796_C179 | SORD Sorbitol dehydrogenase | 4724 |
| P27797_C105 | CALR Calreticulin | 4725 |
| Q969E4_C44 | TCEAL3 Transcription elongation | 4726 |
| | factor A protein-like 3 | |
| Q7KZF4_C152 | SND1 Staphylococcal nuclease domain- | 4727 |
| | containing protein | |
| Q9P1U0_C78 | ZNRD1 DNA-directed RNA | 4728 |
| | polymerase I subunit RPA12 | |
| Q8WZ82_C152 | OVCA2 Ovarian cancer-associated | 4729 |
| | gene 2 protein | |
| Q9NPD3_{——}C97 | EXOSC4 Exosome complex component | 4730 |
| | RRP41 | |
| P52701_C1294 | MSH6 DNA mismatch repair protein | 4731 |
| | Msh6 | |
| P52701_C1337 | MSH6 DNA mismatch repair protein | 4732 |
| | Msh6 | |
| Q15637_C279 | SF1 Splicing factor 1 | 4733 |
| P49366_C177 | DHPS Deoxyhypusine synthase | 4734 |
| Q96PQ7_C677 | KLHL5 Kelch-like protein 5 | 4735 |
| O95785_C1429 | WIZ Protein Wiz | 4736 |
| P49756_C795 | RBM25 RNA-binding protein 25 | 4737 |
| P49591_C398 | SARS Serine--tRNA ligase, | 4738 |
| | cytoplasmic | |
| P31751_C77 | AKT2 RAC-beta serine/threonine- | 4739 |
| | protein kinase | |
| Q9Y2X3_C205 | NOP58 Nucleolar protein 58 | 4740 |
| Q8IZ21_C568 | PHACTR4 Phosphatase and actin | 4741 |
| | regulator 4 | |
| O00410_C266 | IPO5 Importin-5 | 4742 |
| O95861_C249 | BPNT1 3(2),5-bisphosphate | 4743 |
| | nucleotidase 1 | |
| Q9NTK5_C7S | OLA1 Obg-like ATPase 1 | 4744 |
| P60228_C141 | EIF3E Eukaryotic translation initiation | 4745 |
| | factor 3 subunit | |
| Q05048_C44 | CSTF1 Cleavage stimulation factor | 4746 |
| | subunit 1 | |
| P41229_C1551 | KDM5C Lysine-specific demethylase | 4747 |
| | 5C | |
| Q9NZ09_C161 | UBAP1 Ubiquitin-associated protein 1 | 4748 |
| Q9H4A4_C151 | RNPEP Aminopeptidase B | 4749 |
| Q99704_C308 | DOK1 Docking protein 1 | 4750 |
| Q16531_C128 | DDB1 DNA damage-binding protein 1 | 4751 |
| O43294_C91 | TGFB1I1 Transforming growth factor | 4752 |
| | beta-1-induced transcript 1 | |
| P28482_C65 | MAPK1 Mitogen-activated protein | 4753 |
| | kinase 1 | |
| P36578_C250 | RPL4 60S ribosomal protein L4 | 4754 |
| Q9Y5N6_C88 | ORC6 Origin recognition complex | 4755 |
| | subunit 6 | |
| P62487_C106 | POLR2G DNA-directed RNA | 4756 |
| | polymerase II subunit RPB7 | |
| O00139_C406 | KIF2A Kinesin-like protein KIF2A | 4757 |
| P21266_C119 | GSTM3 Glutathione S-transferase Mu 3 | 4758 |
| O00622_C78 | CYR61 Protein CYR61 | 4759 |
| O00622_C117 | CYR61 Protein CYR61 | 4760 |
| O00622_C353 | CYR61 Protein CYR61 | 4761 |
| Q86WA6_C234 | BPHL Valacyclovir hydrolase | 4762 |
| Q9BUF5_C354 | TUBB6 Tubulin beta-6 chain | 4763 |
| Q07960_C91 | ARHGAP1 Rho GTPase-activating | 4764 |
| | protein 1 | |
| P78346_C257 | RPP30 Ribonuclease P protein subunit | 4765 |
| | p30 | |
| P16885_C849 | PLCG2 1-phosphatidylinositol 4,5- | 4766 |
| | bisphosphate phosphodiese | |
| Q969U7_C168 | PSMG2 Proteasome assembly | 4767 |
| | chaperone 2 | |
| Q9BZG1_C38 | RAB34 Ras-related protein Rab-34 | 4768 |
| Q96KQ7_C596 | EHMT2 Histone-lysine N- | 4769 |
| | methyltransferase EHMT2 | |
| Q8IWB7_C401 | WDFY1 WD repeat and FYVE | 4770 |
| | domain-containing protein 1 | |
| Q14566_C721 | MCM6 DNA replication licensing | 4771 |
| | factor MCM6 | |
| P17844_C170 | DDX5 Probable ATP-dependent RNA | 4772 |
| | helicase DDX5 | |
| O94903_C261 | PROSC Proline synthase co-transcribed | 4773 |
| | bacterial homolog | |
| Q9UPN3_C5346 | MACF1 Microtubule-actin cross- | 4774 |
| | linking factor 1, isoforms | |
| P53634_C355 | CTSC Dipeptidyl peptidase 1 | 4775 |
| Q5VZL5_C948 | ZMYM4 Zinc finger MYM-type | 4776 |
| | protein 4 | |
| A5YKK6_C2359 | CNOT1 CCR4-NOT transcription | 4777 |
| | complex subunit 1 | |
| Q9BWU0_C336 | SLC4A1AP Kanadaptin | 4778 |
| O75369_C1868 | FLNB Filamin-B | 4779 |
| O75369_C1876 | FLNB Filamin-B | 4780 |
| P21980_C620 | TGM2 Protein-glutamine gamma- | 4781 |
| | glutamyltransferase 2 | |
| Q14966_C1279 | ZNF638 Zinc finger protein 638 | 4782 |
| P50395_C335 | GDI2 Rab GDP dissociation inhibitor | 4783 |
| | beta | |
| Q13643_C150 | FHL3 Four and a half LIM domains | 4784 |
| | protein 3 | |
| Q16181_C161 | SEPT7 Septin-7 | 4785 |
| Q9UPR0_C90 | PLCL2 Inactive phospholipase C-like | 4786 |
| | protein 2 | |
| Q9UPR0_C1095 | PLCL2 Inactive phospholipase C-like | 4787 |
| | protein 2 | |
| O14787_C132 | TNPO2 Transportin-2 | 4788 |
| O15067_C1338 | PFAS | 4789 |
| | Phosphoribosylformylglycinamidine | |
| | synthase | |
| Q9NW64_C58 | RBM22 Pre-mRNA-splicing factor | 4790 |
| | RBM22 | |
| O00273_C21 | DFFA DNA fragmentation factor | 4791 |
| | subunit alpha | |
| Q86V21_C493 | AACS Acetoacetyl-CoA synthetase | 4792 |
| Q96GX5_C251 | MASTL Serine/threonine-protein | 4793 |
| | kinase greatwall | |
| Q96GX5_C614 | MASTL Serine/threonine-protein | 4794 |
| | kinase greatwall | |
| O60493_C140 | SNX3 Sorting nexin-3 | 4795 |
| P29279_C120 | CTGF Connective tissue growth factor | 4796 |
| P49790_C585 | NUP153 Nuclear pore complex protein | 4797 |
| | Nup153 | |
| P49790_C753 | NUP153 Nuclear pore complex protein | 4798 |
| | Nup153 | |
| P51114_C99 | FXR1 Fragile X mental retardation | 4799 |
| | syndrome-related protein | |
| Q15170_C88 | TCEAL1 Transcription elongation | 4800 |
| | factor A protein-like 1 | |
| Q8IY18_C229 | SMC5 Structural maintenance of | 4801 |
| | chromosomes protein 5 | |
| P62979_C126 | RPS27A Ubiquitin-40S ribosomal | 4802 |
| | protein S27a | |
| Q9BSJ8_C635 | ESYT1 Extended synaptotagmin-1 | 4803 |
| P35658_C399 | NUP214 Nuclear pore complex protein | 4804 |
| | Nup214 | |
| P27694_C200 | RPA1 Replication protein A 70 kDa | 4805 |
| | DNA-binding subunit | |
| P27694_C503 | RPA1 Replication protein A 70 kDa | 4806 |
| | DNA-binding subunit | |
| P46013_C1843 | MKI67 Antigen KI-67 | 4807 |
| P17858_C212 | PFKL 6-phosphofructokinase, liver | 4808 |
| | type | |
| Q14353_C220 | GAMT Guanidinoacetate N- | 4809 |
| | methyltransferase | |
| Q7Z5J4_C239 | RAI1 Retinoic acid-induced protein 1 | 4810 |
| O75083_C438 | WDR1 WD repeat-containing protein 1 | 4811 |
| Q8WXH0_C553 | SYNE2 Nesprin-2 | 4812 |
| Q14137_C469 | BOP1 Ribosome biogenesis protein | 4813 |
| | BOP1 | |
| Q8N4X5_C781 | AFAP1L2 Actin filament-associated | 4814 |
| | protein 1-like 2 | |
| P52732_C773 | KIF11 Kinesin-like protein KIF11 | 4815 |
| Q7Z6Z7_C1879 | HUWE1 E3 ubiquitin-protein ligase | 4816 |
| | HUWE1 | |
| Q7Z6Z7_C4099 | HUWE1 E3 ubiquitin-protein ligase | 4817 |
| | HUWE1 | |
| P11216_C496 | PYGB Glycogen phosphorylase, brain | 4818 |
| | form | |
| Q16514_C143 | TAF12 Transcription initiation factor | 4819 |
| | TFIID subunit 12 | |
| Q9H3P2_C471 | WHSC2 Negative elongation factor A | 4820 |
| Q9UFC0_C88 | LRWD1 Leucine-rich repeat and WD | 4821 |
| | repeat-containing protein | |
| Q9UFC0_C249 | LRWD1 Leucine-rich repeat and WD | 4822 |
| | repeat-containing prote | |
| Q96RR4_C223 | CAMKK2 Calcium/calmodulin- | 4823 |
| | dependent protein kinase kinase | |
| Q9UJU6_C97 | DBNL Drebrin-like protein | 4824 |
| Q9NYZ3_C45 | GTSE1 G2 and S phase-expressed | 4825 |
| | protein 1 | |
| Q9ULI3_C1360 | HEG1 Protein HEG homolog 1 | 4826 |
| P38606_C277 | ATP6V1A V-type proton ATPase | 4827 |
| | catalytic subunit A | |
| Q9UPQ0_C333 | LIMCH1 LIM and calponin homology | 4828 |
| | domains-containing protein | |
| Q7L2H7_C125 | EIF3M Eukaryotic translation initiation | 4829 |
| | factor 3 subunit | |
| Q9BPX3_C177 | NCAPG Condensin complex subunit 3 | 4830 |
| O95757_C540 | HSPA4L Heat shock 70 kDa protein 4L | 4831 |
| O95757_C589 | HSPA4L Heat shock 70 kDa protein 4L | 4832 |
| Q9BWH6_C195 | RPAP1 RNA polymerase Il-associated | 4833 |
| | protein 1 | |
| Q8NHV4_C314 | NEDD1 Protein NEDD1 | 4834 |
| Q9UJV9_C568 | DDX41 Probable ATP-dependent RNA | 4835 |
| | helicase DDX41 | |
| P13010_C157 | XRCC5 X-ray repair cross- | 4836 |
| | complementing protein 5 | |
| O95340_C202 | PAPSS2 Bifunctional 3- | 4837 |
| | phosphoadenosine 5-phosphosulfate | |
| Q5JZ73_C9 | LINC00207 Protein LINC00207 | 4838 |
| Q6DN90_C214 | IQSEC1 IQ motif and SEC7 domain- | 4839 |
| | containing protein 1 | |
| Q9BZE9_C127 | ASPSCR1 Tether containing UBX | 4840 |
| | domain for GLUT4 | |
| O95294_C386 | RASAL1 RasGAP-activating-like | 4841 |
| | protein 1 | |
| O95294_C534 | RASAL1 RasGAP-activating-like | 4842 |
| | protein 1 | |
| P06737_C496 | PYGL Glycogen phosphorylase, liver | 4843 |
| | form | |
| Q92616_C1482 | GCN1L1 Translational activator GCN1 | 4844 |
| Q9Y6I9_C165 | TEX264 Testis-expressed sequence 264 | 4845 |
| | protein | |
| Q99996_C1966 | AKAP9 A-kinase anchor protein 9 | 4846 |
| Q6UB99_C2640 | ANKRD11 Ankyrin repeat domain- | 4847 |
| | containing protein 11 | |
| Q9NRV9_C168 | HEBP1 Heme-binding protein 1 | 4848 |
| Q6ZUT6_C437 | C15orf52 Uncharacterized protein | 4849 |
| | C15orf52 | |
| P15407_C172 | FOSL1 Fos-related antigen 1 | 4850 |
| Q9BYG3_C237 | MKI67IP MKI67 FHA domain- | 4851 |
| | interacting nucleolar phosphoprotein | |
| P49327_C496 | FASN Fatty acid synthase | 4852 |
| Q99436_C74 | PSMB7 Proteasome subunit beta type-7 | 4853 |
| Q96BR1_C308 | SGK3 Serine/threonine-protein kinase | 4854 |
| | Sgk3 | |
| Q9GZS1_C200 | POLR1E DNA-directed RNA | 4855 |
| | polymerase I subunit RPA49 | |
| P41091_C269 | EIF2S3 Eukaryotic translation initiation | 4856 |
| | factor 2 subunit | |
| Q12769_C659 | NUP160 Nuclear pore complex protein | 4857 |
| | Nup160 | |
| P13489_C313 | RNH1 Ribonuclease inhibitor | 4858 |
| Q9H5N1_C482 | RABEP2 Rab GTPase-binding effector | 4859 |
| | protein 2 | |
| Q9Y2Z0_C49 | SUGT1 Suppressor of G2 allele of | 4860 |
| | SKP1 homolog | |
| P48444_C441 | ARCN1 Coatomer subunit delta | 4861 |
| Q12888_C1375 | TP53BP1 Tumor suppressor p53- | 4862 |
| | binding protein 1 | |
| P14921_C112 | ETS1 Protein C-ets-1 | 4863 |
| Q5JTZ9_C443 | AARS2 Alanine--tRNA ligase, | 4864 |
| | mitochondrial | |
| Q92990_C406 | GLMN Glomulin | 4865 |
| Q9P0J1_C132 | PDP1 | 4866 |
| Q8NBJ5_C369 | GLT25D1 Procollagen | 4867 |
| | galactosyltransferase 1 | |
| P01591_C94 | IGJ Immunoglobulin J chain | 4868 |
| Q96QR8_C238 | PURB Transcriptional activator protein | 4869 |
| | Pur-beta | |
| Q99832_C326 | CCT7 T-complex protein 1 subunit eta | 4870 |
| O95218_C71 | ZRANB2 Zinc finger Ran-binding | 4871 |
| | domain-containing protein | |
| O43237_C191 | DYNC1LI2 Cytoplasmic dynein 1 light | 4872 |
| | intermediate chain 2 | |
| Q92576_C276 | PHF3 PHD finger protein 3 | 4873 |
| Q9HAU0_C473 | PLEKHA5 Pleckstrin homology | 4874 |
| | domain-containing family A member | |
| O95425_C76 | SVIL Supervillin | 4875 |
| Q8TD30_C158 | GPT2 Alanine aminotransferase 2 | 4876 |
| Q8TD30_C347 | GPT2 Alanine aminotransferase 2 | 4877 |
| Q14790_C409 | CASP8 Caspase-8 | 4878 |
| P09211_C170 | GSTP1 Glutathione S-transferase P | 4879 |
| Q03519_C641 | TAP2 Antigen peptide transporter 2 | 4880 |
| Q9ULW0_C462 | TPX2 Targeting protein for Xklp2 | 4881 |
| Q16222_C251 | UAP1 UDP-N-acetylhexosamine | 4882 |
| | pyrophosphorylase | |
| P61158_C408 | ACTR3 Actin-related protein 3 | 4883 |
| Q6WKZ4_C318 | RAB11FIP1 Rab11 family-interacting | 4884 |
| | protein 1 | |
| Q9HCE7_C725 | SMURF1 E3 ubiquitin-protein ligase | 4885 |
| | SMURF1 | |
| Q13564_C153 | NAE1 NEDD8-activating enzyme E1 | 4886 |
| | regulatory subunit | |
| Q13564_C384 | NAE1 NEDD8-activating enzyme E1 | 4887 |
| | regulatory subunit | |
| P31146_C24 | CORO1A Coronin-1A | 4888 |
| Q96JM7_C169 | L3MBTL3 Lethal(3)malignant brain | 4889 |
| | tumor-like protein 3 | |
| P07199_C135 | CENPB Major centromere autoantigen | 4890 |
| | B | |
| O00442_C28 | RTCA RNA 3-terminal phosphate | 4891 |
| | cyclase | |
| P13639_C388 | EEF2 Elongation factor 2 | 4892 |
| Q9P0K7_C468 | RAI14 Ankycorbin | 4893 |
| P35606_C276 | COPB2 Coatomer subunit beta | 4894 |
| P46199_C290 | MTIF2 Translation initiation factor IF- | 4895 |
| | 2, mitochondrial | |
| P78527_C232 | PRKDC DNA-dependent protein kinase | 4896 |
| | catalytic subunit | |
| P78527_C1455 | PRKDC DNA-dependent protein kinase | 4897 |
| | catalytic subunit | |
| P78527_C4045 | PRKDC DNA-dependent protein kinase | 4898 |
| | catalytic subunit | |
| P11908_C60 | PRPS2 Ribose-phosphate | 4899 |
| | pyrophosphokinase 2 | |
| Q9H410_C65 | DSN1 Kinetochore-associated protein | 4900 |
| | DSN1 homolog | |
| Q14498_C478 | RBM39 RNA-binding protein 39 | 4901 |
| O75694_C1344 | NUP155 Nuclear pore complex protein | 4902 |
| | Nup155 | |
| Q8WU76_C79 | SCFD2 Sec1 family domain-containing | 4903 |
| | protein 2 | |
| Q8IU81_C207 | IRF2BP1 Interferon regulatory factor 2- | 4904 |
| | binding protein 1 | |
| P49189_C443 | ALDH9A1 4- | 4905 |
| | trimethylaminobutyraldehyde | |
| | dehydrogenase | |
| Q14789_C1257 | GOLGB1 Golgin subfamily B member | 4906 |
| | 1 | |
| Q8N5K1_C92 | CISD2 CDGSH iron-sulfur domain- | 4907 |
| | containing protein 2 | |
| O43592_C693 | XPOT Exportin-T | 4908 |
| O43374_C302 | RASA4 Ras GTPase-activating protein | 4909 |
| | 4 | |
| O43374_C657 | RASA4 Ras GTPase-activating protein | 4910 |
| | 4 | |
| Q9NUQ3_C480 | TXLNG Gamma-taxilin | 4911 |
| P63104_C189 | YWHAZ 14-3-3 protein zeta/delta | 4912 |
| O60216_C392 | RAD21 Double-strand-break repair | 4913 |
| | protein rad21 homolog | |
| Q8N3U4_C869 | STAG2 Cohesin subunit SA-2 | 4914 |
| Q9ULV4_C283 | CORO1C Coronin-1C | 4915 |
| P61160_C221 | ACTR2 Actin-related protein 2 | 4916 |
| Q12904_C161 | AIMP1 Aminoacyl tRNA synthase | 4917 |
| | complex-interacting multifunctional | |
| | protein 1 | |
| Q9H9P8_C187 | L2HGDH L-2-hydroxyglutarate | 4918 |
| | dehydrogenase, mitochondrial | |
| Q7Z2W4_C272 | ZC3HAV1 Zinc finger CCCH-type | 4919 |
| | antiviral protein 1 | |
| P30153_C148 | PPP2R1A Serine/threonine-protein | 4920 |
| | phosphatase 2A 65 kDa regulatory | |
| | subunit A alpha isoform | |
| Q92797_C969 | SYMPK Symplekin | 4921 |
| Q9Y3B7_C50 | MRPL11 39S ribosomal protein L11, | 4922 |
| | mitochondrial | |
| Q9BV44_C391 | THUMPD3 THUMP domain- | 4923 |
| | containing protein 3 | |
| O14578_C402 | CIT Citron Rho-interacting kinase | 4924 |
| Q9NVU0_C70 | POLR3E DNA-directed RNA | 4925 |
| | polymerase III subunit RPC5 | |
| Q92947_C115 | GCDH Glutaryl-CoA dehydrogenase, | 4926 |
| | mitochondrial | |
| Q6PJ69_C320 | TRIM65 Tripartite motif-containing | 4927 |
| | protein 65 | |
| Q15027_C501 | ACAP1 Arf-GAP with coiled-coil, | 4928 |
| | ANK repeat and PH domain | |
| Q15020_C341 | SART3 Squamous cell carcinoma | 4929 |
| | antigen recognized by T-cells 3 | |
| Q9Y6J9_C41 | TAF6L TAF6-like RNA polymerase II | 4930 |
| | p300/CBP-associated factor 6 like | |
| P17812_C216 | CTPS1 CTP synthase 1 | 4931 |
| Q96GG9_C29 | DCUN1D1 DCN1-like protein 1 | 4932 |
| Q14315_C1448 | FLNC Filamin-C | 4933 |
| Q9NSP4_C40 | CENPM Centromere protein M | 4934 |
| Q9Y3B2_C40 | EXOSC1 Exosome complex component | 4935 |
| | CSL4 | |
| Q9H4K7_C206 | GTPBP5 GTP-binding protein 5 | 4936 |
| P62140_C201 | PPP1CB Serine/threonine-protein | 4937 |
| | phosphatase PP1-beta catalytic subunit | |
| Q9H063_C133 | MAF1 Repressor of RNA polymerase | 4938 |
| | III transcription MAF1 | |
| P23434_C138 | GCSH Glycine cleavage system H | 4939 |
| | protein, mitochondrial | |
| Q5JPH6_C386 | EARS2 Probable glutamate--tRNA | 4940 |
| | ligase, mitochondrial | |
| O14976_C1142 | GAK Cyclin-G-associated kinase | 4941 |
| O14974_C553 | PPP1R12A Protein phosphatase 1 | 4942 |
| | regulatory subunit 12A | |
| Q9H9A6_C438 | LRRC40 Leucine-rich repeat- | 4943 |
| | containing protein 40 | |
| Q13315_C2607 | ATM Serine-protein kinase ATM | 4944 |
| P51116_C270 | FXR2 Fragile X mental retardation | 4945 |
| | syndrome-related protein | |
| Q8N3X1_C877 | FNBP4 Formin-binding protein 4 | 4946 |
| P36404_C153 | ARL2 ADP-ribosylation factor-like | 4947 |
| | protein 2 | |
| Q9HD64_C43 | XAGE1E G antigen family D member | 4948 |
| | 2 | |
| Q8NF50_C1230 | DOCK8 Dedicator of cytokinesis | 4949 |
| | protein 8 | |
| Q8WWM7_C628 | ATXN2L Ataxin-2-like protein | 4950 |
| P55795_C290 | HNRNPH2 Heterogeneous nuclear | 4951 |
| | ribonucleoprotein H2 | |
| Q9BYW2_C1471 | SETD2 Histone-lysine N- | 4952 |
| | methyltransferase SETD2 | |
| O15143_C202 | ARPC1B Actin-related protein 2/3 | 4953 |
| | complex subunit 1B | |
| O15294_C323 | OGT UDP-N-acetylglucosamine-- | 4954 |
| | peptide N-acetylglucosamine (GlcNAc) | |
| | transferase | |
| Q92945_C176 | KHSRP Far upstream element-binding | 4955 |
| | protein 2 | |
| O43847_C60 | NRD1 Nardilysin | 4956 |
| Q9H9A5_C504 | CNOT10 CCR4-NOT transcription | 4957 |
| | complex subunit 10 | |
| Q9H9A5_C633 | CNOT10 CCR4-NOT transcription | 4958 |
| | complex subunit 10 | |
| P10155_C71 | TROVE2 60 kDa SS-A/Ro | 4959 |
| | ribonucleoprotein | |
| P52789_C386 | HK2 Hexokinase-2 | 4960 |
| Q01469_C43 | FABP5 Fatty acid-binding protein, | 4961 |
| | epidermal | |
| P46734_C305 | MAP2K3 Dual specificity mitogen- | 4962 |
| | activated protein kinase | |
| P35579_C511 | MYH9 Myosin-9 | 4963 |
| P35579_C789 | MYH9 Myosin-9 | 4964 |
| Q9Y3C1_C36 | NOP16 Nucleolar protein 16 | 4965 |
| P62888_C52 | RPL30 60S ribosomal protein L30 | 4966 |
| Q8TAQ2_C495 | SMARCC2 SWI/SNF complex subunit | 4967 |
| | SMARCC2 | |
| O94854_C242 | KIAA0754 Uncharacterized protein | 4968 |
| | KIAA0754 | |
| P23526_C113 | AHCY Adenosylhomocysteinase | 4969 |
| Q6QNY1_C41 | BLOC1S2 Biogenesis of lysosome- | 4970 |
| | related organelles complex | |
| Q7Z7A4_C196 | PXK PX domain-containing protein | 4971 |
| | kinase-like protein | |
| Q14699_C128 | RFTN1 Raftlin | 4972 |
| Q14694_C254 | USP10 Ubiquitin carboxyl-terminal | 4973 |
| | hydrolase 10 | |
| Q13435_C661 | SF3B2 Splicing factor 3B subunit 2 | 4974 |
| P22692_C38 | IGFBP4 Insulin-like growth factor- | 4975 |
| | binding protein 4 | |
| P22692_C215 | IGFBP4 Insulin-like growth factor- | 4976 |
| | binding protein 4 | |
| P60900_C161 | PSMA6 Proteasome subunit alpha type- | 4977 |
| | 6 | |
| Q9NWY4_C17 | C4orf27 UPF0609 protein C4orf27 | 4978 |
| P12004_C62 | PCNA Proliferating cell nuclear antigen | 4979 |
| O00148_C238 | DDX39A ATP-dependent RNA | 4980 |
| | helicase DDX39A | |
| Q9BW19_C144 | KIFC1 Kinesin-like protein KIFC1 | 4981 |
| Q9BW19_C557 | KIFC1 Kinesin-like protein KIFC1 | 4982 |
| Q15477_C247 | SKIV2L Helicase SKI2W | 4983 |
| Q9NQ89_C9 | C12orf4 Uncharacterized protein | 4984 |
| | C12orf4 | |
| Q9Y2R9_C152 | MRPS7 28S ribosomal protein S7, | 4985 |
| | mitochondrial | |
| Q12933_C287 | TRAF2 TNF receptor-associated factor | 4986 |
| | 2 | |
| Q12931_C501 | TRAP1 Heat shock protein 75 kDa, | 4987 |
| | mitochondrial | |
| Q9NQS1_C251 | AVEN Cell death regulator Aven | 4988 |
| Q9UBB4_C134 | ATXN10 Ataxin-10 | 4989 |
| Q9UBB4_C382 | ATXN10 Ataxin-10 | 4990 |
| Q9C0C9_C910 | UBE2O Ubiquitin-conjugating enzyme | 4991 |
| | E2 O | |
| Q9BTW9_C234 | TBCD Tubulin-specific chaperone D | 4992 |
| Q9Y520_C2340 | PRRC2C Protein PRRC2C | 4993 |
| O75533_C933 | SF3B1 Splicing factor 3B subunit 1 | 4994 |
| O75533_C1059 | SF3B1 Splicing factor 3B subunit 1 | 4995 |
| Q96BD8_C29 | SKA1 Spindle and kinetochore- | 4996 |
| | associated protein 1 | |
| Q14192_C28 | FHL2 Four and a half LIM domains | 4997 |
| | protein 2 | |
| Q14192_C129 | FHL2 Four and a half LIM domains | 4998 |
| | protein 2 | |
| Q92844_C328 | TANK TRAF family member- | 4999 |
| | associated NF-kappa-B activator | |
| Q9Y4H4_C116 | GPSM3 G-protein-signaling modulator | 5000 |
| | 3 | |
| P30154_C389 | PPP2R1B Serine/threonine-protein | 5001 |
| | phosphatase 2A 65 kDa regulatory | |
| | subunit A beta | |
| Q9UN37_C403 | VPS4A Vacuolar protein sorting- | 5002 |
| | associated protein 4A | |
| Q96RL1_C121 | UIMC1 BRCA1-A complex subunit | 5003 |
| | RAP80 | |
| Q8WZA9_C443 | IRGQ Immunity-related GTPase family | 5004 |
| | Q protein | |
| Q8IZT6_C51 | ASPM Abnormal spindle-like | 5005 |
| | microcephaly-associated protein | |
| P11586_C408 | MTHFD1 C-1-tetrahydrofolate | 5006 |
| | synthase, cytoplasmic | |
| P11586_C691 | MTHFD1 C-1-tetrahydrofolate | 5007 |
| | synthase, cytoplasmic | |
| P11586_C785 | MTHFD1 C-1-tetrahydrofolate | 5008 |
| | synthase, cytoplasmic | |
| P21912_C243 | SDHB Succinate dehydrogenase | 5009 |
| Q99471_C49 | PFDN5 Prefoldin subunit 5 | 5010 |
| P48735_C336 | IDH2 Isocitrate dehydrogenase | 5011 |
| Q9UJM3_C430 | ERRFI1 ERBB receptor feedback | 5012 |
| | inhibitor 1 | |
| Q6IA69_C627 | NADSYN1 Glutamine-dependent | 5013 |
| | NAD(+) synthetase | |
| P61221_C201 | ABCE1 ATP-binding cassette sub- | 5014 |
| | family E member 1 | |
| Q7L1V2_C326 | MON1B Vacuolar fusion protein | 5015 |
| | MON1 homolog B | |
| Q7L1V2_C349 | MON1B Vacuolar fusion protein | 5016 |
| | MON1 homolog B | |
| P62136_C202 | PPP1CA Serine/threonine-protein | 5017 |
| | phosphatase PP1-alpha catalytic subunit | |
| Q8IWS0_C87 | PHF6 PHD finger protein 6 | 5018 |
| O95239_C1159 | KIF4A Chromosome-associated kinesin | 5019 |
| | KIF4A | |
| P05091_C66 | ALDH2 Aldehyde dehydrogenase, | 5020 |
| | mitochondrial | |
| O75817_C66 | POP7 Ribonuclease P protein subunit | 5021 |
| | p20 | |
| O15231_C650 | ZNF185 Zinc finger protein 185 | 5022 |
| Q92922_C520 | SMARCC1 SWI/SNF complex subunit | 5023 |
| | SMARCC1 | |
| Q9NSY1_C32 | BMP2K BMP-2-inducible protein | 5024 |
| | kinase | |
| O60671_C148 | RAD1 Cell cycle checkpoint protein | 5025 |
| | RAD1 | |
| O75676_C425 | RPS6KA4 Ribosomal protein S6 kinase | 5026 |
| | alpha-4 | |
| Q01082_C964 | SPTBN1 Spectrin beta chain, non- | 5027 |
| | erythrocytic 1 | |
| P61812_C380 | TGFB2 Transforming growth factor | 5028 |
| | beta-2 | |
| P42704_C361 | LRPPRC Leucine-rich PPR motif- | 5029 |
| | containing protein, mitochondrial | |
| P42858_C777 | HTT Huntingtin | 5030 |
| P42858_C1808 | HTT Huntingtin | 5031 |
| P34932_C146 | HSPA4 Heat shock 70 kDa protein 4 | 5032 |
| P34932_C167 | HSPA4 Heat shock 70 kDa protein 4 | 5033 |
| O43447_C174 | PPIH Peptidyl-prolyl cis-trans | 5034 |
| | isomerase H | |
| P31937_C75 | HIBADH 3-hydroxyisobutyrate | 5035 |
| | dehydrogenase, mitochondrial | |
| P31937_C199 | HIBADH 3-hydroxyisobutyrate | 5036 |
| | dehydrogenase, mitochondrial | |
| Q8IXK0_C740 | PHC2 Polyhomeotic-like protein 2 | 5037 |
| Q9NUI1_C120 | DECR2 Peroxisomal 2,4-dienoyl-CoA | 5038 |
| | reductase | |
| Q9NR50_C334 | EEF2B3 Translation initiation factor | 5039 |
| | eIF-2B subunit gamma | |
| Q9NV56_C59 | MRGBP MRG-binding protein | 5040 |
| Q9BYV9_C340 | BACH2 Transcription regulator protein | 5041 |
| | BACH2 | |
| P08237_C351 | PFKM 6-phosphofructokinase, muscle | 5042 |
| | type | |
| Q15118_C240 | PDK1 | 5043 |
| Q5M775_C805 | SPECC1 Cytospin-B | 5044 |
| Q9H845_C507 | ACAD9 Acyl-CoA dehydrogenase | 5045 |
| | family member 9, mitochondrial | |
| Q8TF72_C1983 | SHROOM3 Protein Shroom3 | 5046 |
| Q7Z5L9_C521 | IRF2BP2 Interferon regulatory factor 2- | 5047 |
| | binding protein 2 | |
| Q86VP6_C237 | CAND1 Cullin-associated NEDD8- | 5048 |
| | dissociated protein 1 | |
| O43148_C95 | RNMT mRNA cap guanine-N7 | 5049 |
| | methyltransferase | |
| P27144_C104 | AK4 Adenylate kinase isoenzyme 4, | 5050 |
| | mitochondrial | |
| P67775_C269 | PPP2CA Serine/threonine-protein | 5051 |
| | phosphatase 2A catalytic | |
| Q92667_C438 | AKAP1 A-kinase anchor protein 1, | 5052 |
| | mitochondrial | |
| Q9NYL2_C285 | MLTK Mitogen-activated protein | 5053 |
| | kinase kinase kinase MLT | |
| Q9Y5X2_C455 | SNX8 Sorting nexin-8 | 5054 |
| Q14152_C185 | EIF3A Eukaryotic translation initiation | 5055 |
| | factor 3 subunit | |
| Q15669_C108 | RHOH Rho-related GTP-binding | 5056 |
| | protein RhoH | |
| P19623_C89 | SRM Spermidine synthase | 5057 |
| P63244_C153 | GNB2L1 Guanine nucleotide-binding | 5058 |
| | protein subunit beta-2-like 1 | |
| Q9NZB2_C892 | FAM120A Constitutive coactivator of | 5059 |
| | PPAR-gamma-like protein | |
| Q15398_C696 | DLGAP5 Disks large-associated protein | 5060 |
| | 5 | |
| O60566_C51 | BUB1B Mitotic checkpoint | 5061 |
| | serine/threonine-protein kinase | |
| Q9UDY4_C175 | DNAJB4 DnaJ homolog subfamily B | 5062 |
| | member 4 | |
| Q03001_C6799 | DST Dystonin | 5063 |
| P11182_C279 | DBT Lipoamide acyltransferase | 5064 |
| | component of branched-chain | |
| | transacylase E2 | |
| P56537_C110 | EIF6 Eukaryotic translation initiation | 5065 |
| | factor 6 | |
| O15037_C157 | KHNYN Protein KHNYN | 5066 |
| Q15052_C57 | ARHGEF6 Rho guanine nucleotide | 5067 |
| | exchange factor 6 | |
| Q15052_C553 | ARHGEF6 Rho guanine nucleotide | 5068 |
| | exchange factor 6 | |
| O00592_C381 | PODXL Podocalyxin | 5069 |
| E7EVH7_C408 | KLC1 Kinesin light chain 1 | 5070 |
| E7EVH7_C628 | KLC1 Kinesin light chain 1 | 5071 |
| Q9H2U2_C161 | PPA2 Inorganic pyrophosphatase 2, | 5072 |
| | mitochondrial | |
| P24390_C29 | KDELR1 ER lumen protein retaining | 5073 |
| | receptor 1 | |
| Q9H0W9_C149 | C11orf54 Ester hydrolase C11orf54 | 5074 |
| Q9H0W9_C154 | C11orf54 Ester hydrolase C11orf54 | 5075 |
| Q9UK59_C339 | DBR1 Lariat debranching enzyme | 5076 |
| Q6P2Q9_C435 | PRPF8 Pre-mRNA-processing-splicing | 5077 |
| | factor 8 | |
| O75586_C137 | MED6 Mediator of RNA polymerase II | 5078 |
| | transcription subunit | |
| Q99933_C213 | BAG1 BAG family molecular | 5079 |
| | chaperone regulator 1 | |
| Q9H4L5_C515 | OSBPL3 Oxysterol-binding protein- | 5080 |
| | related protein 3 | |
| Q14149_C694 | MORC3 MORC family CW-type zinc | 5081 |
| | finger protein 3 | |
| Q92546_C314 | RGP1 Retrograde Golgi transport | 5082 |
| | protein RGP1 homolog | |
| P46821_C1228 | MAP1B Microtubule-associated protein | 5083 |
| | 1B | |
| O60343_C753 | TBC1D4 TBC1 domain family member | 5084 |
| | 4 | |
| Q9UBT2_C432 | UBA2 SUMO-activating enzyme | 5085 |
| | subunit 2 | |
| Q86SQ0_C935 | PHLDB2 Pleckstrin homology-like | 5086 |
| | domain family B member 2 | |
| Q96A65_C957 | EXOC4 Exocyst complex component 4 | 5087 |
| O14980_C498 | XPO1 Exportin-1 | 5088 |
| Q9ULP9_C29 | TBC1D24 TBC1 domain family | 5089 |
| | member 24 | |
| P28290_C448 | SSFA2 Sperm-specific antigen 2 | 5090 |
| P31948_C62 | STIP1 Stress-induced-phosphoprotein 1 | 5091 |
| O95071_C739 | UBR5 E3 ubiquitin-protein ligase | 5092 |
| | UBR5 | |
| Q96L91_C694 | EP400 E1A-binding protein p400 | 5093 |
| Q9Y2L1_C357 | DIS3 Exosome complex exonuclease | 5094 |
| | RRP44 | |
| Q96L94_C184 | SNX22 Sorting nexin-22 | 5095 |
| Q15437_C40 | SEC23B Protein transport protein | 5096 |
| | Sec23B | |
| Q9H0F6_C140 | SHARPIN Sharpin | 5097 |
| Q6NZY4_C633 | ZCCHC8 Zinc finger CCHC domain- | 5098 |
| | containing protein 8 | |
| Q6NVY1_C271 | HIBCH 3-hydroxyisobutyryl-CoA | 5099 |
| | hydrolase, mitochondrial | |
| P38432_C425 | COIL Coilin | 5100 |
| Q29RF7_C508 | PDS5A Sister chromatid cohesion | 5101 |
| | protein PDS5 homolog A | |
| Q29RF7_C925 | PDS5A Sister chromatid cohesion | 5102 |
| | protein PDS5 homolog A | |
| Q8N5C7_C40 | DTWD1 DTW domain-containing | 5103 |
| | protein 1 | |
| O60437_C660 | PPL Periplakin | 5104 |
| Q15042_C678 | RAB3GAP1 Rab3 GTPase-activating | 5105 |
| | protein catalytic subunit | |
| O15111_C406 | CHUK Inhibitor of nuclear factor | 5106 |
| | kappa-B kinase subunit | |
| P49915_C554 | GMPS GMP synthase | 5107 |
| Q9Y490_C709 | TLN1 Talin-1 | 5108 |
| Q9Y490_C1661 | TLN1 Talin-1 | 5109 |
| Q9UGI8_C238 | TES Testin | 5110 |
| Q9Y3D3_C26 | MRPS16 28S ribosomal protein S16, | 5111 |
| | mitochondrial | |
| Q8WUY1_C104 | THEM6 UPF0670 protein THEM6 | 5112 |
| Q969Y2_C489 | GTPBP3 tRNA modification GTPase | 5113 |
| | GTPBP3, mitochondrial | |
| Q13042_C194 | CDC16 Cell division cycle protein 16 | 5114 |
| | homolog | |
| Q8IWP9_C108 | CCDC28A Coiled-coil domain- | 5115 |
| | containing protein 28A | |
| Q13469_C386 | NFATC2 Nuclear factor of activated T- | 5116 |
| | cells, cytoplasmic 2 | |
| Q13263_C232 | TRIM28 Transcription intermediary | 5117 |
| | factor 1-beta | |
| Q16822_C210 | PCK2 Phosphoenolpyruvate | 5118 |
| | carboxykinase | |
| Q96BY7_C891 | ATG2B Autophagy-related protein 2 | 5119 |
| | homolog B | |
| Q9H8M7_C27 | FAM188A Protein FAM188A | 5120 |
| Q8N7H5_C36 | PAF1 RNA polymerase II-associated | 5121 |
| | factor 1 homolog | |
| O00116_C226 | AGPS | 5122 |
| | Alkyldihydroxyacetonephosphate | |
| | synthase, peroxisom | |
| O14641_C354 | DVL2 Segment polarity protein | 5123 |
| | dishevelled homolog DVL-2 | |
| P49588_C723 | AARS Alanine--tRNA ligase, | 5124 |
| | cytoplasmic | |
| Q9H0G5_C171 | NSRP1 Nuclear speckle splicing | 5125 |
| | regulatory protein 1 | |
| Q9NZN5_C784 | ARIIGEF12 Rho guanine nucleotide | 5126 |
| | exchange factor 12 | |
| Q5JVF3_C362 | PCID2 PCI domain-containing protein | 5127 |
| | 2 | |
| P56192_C566 | MARS Methionine--tRNA ligase, | 5128 |
| | cytoplasmic | |
| P07954_C434 | FH Fumarate hydratase, mitochondrial | 5129 |
| P09429_C106 | HMGB1 High mobility group protein | 5130 |
| | B1 | |
| Q9BVP2_C158 | GNL3 Guanine nucleotide-binding | 5131 |
| | protein-like 3 | |
| Q13813_C315 | SPTAN1 Spectrin alpha chain, non- | 5132 |
| | erythrocytic 1 | |
| Q66PJ3_C159 | ARL6IP4 ADP-ribosylation factor-like | 5133 |
| | protein 6-interacting | |
| P55957_C15 | BID BH3-interacting domain death | 5134 |
| | agonist | |
| Q9H4A3_C547 | WNK1 Serine/threonine-protein kinase | 5135 |
| | WNK1 | |
| P27797_C137 | CALR Calreticulin | 5136 |
| P15498_C83 | VAV1 Proto-oncogene vav | 5137 |
| Q9Y572_C365 | RIPK3 Receptor-interacting | 5138 |
| | serine/threonine-protein kina | |
| Q8IX90_C290 | SKA3 Spindle and kinetochore- | 5139 |
| | associated protein 3 | |
| O96019_C32 | ACTL6A Actin-like protein 6A | 5140 |
| P46939_C447 | UTRN Utrophin | 5141 |
| P46939_C1759 | UTRN Utrophin | 5142 |
| P52701_C1275 | MSH6 DNA mismatch repair protein | 5143 |
| | Msh6 | |
| Q14160_C1612 | SCRIB Protein scribble homolog | 5144 |
| O14879_C39 | IFIT3 Interferon-induced protein with | 5145 |
| | tetratricopeptide | |
| Q16543_C64 | CDC37 Hsp90 co-chaperone Cdc37 | 5146 |
| O75962_C868 | TRIO Triple functional domain protein | 5147 |
| Q9H3S7_C1466 | PTPN23 Tyrosine-protein phosphatase | 5148 |
| | non-receptor type 23 | |
| P26196_C102 | DDX6 Probable ATP-dependent RNA | 5149 |
| | helicase DDX6 | |
| P33992_C207 | MCM5 DNA replication licensing | 5150 |
| | factor MCM5 | |
| O14893_C34 | GEMIN2 Gem-associated protein 2 | 5151 |
| Q86SE5_C51 | RALYL RNA-binding Raly-like protein | 5152 |
| Q9BUN5_C13 | CCDC28B Coiled-coil domain- | 5153 |
| | containing protein 28B | |
| Q9NR12_C388 | PDLIM7 PDZ and LIM domain protein | 5154 |
| | 7 | |
| Q9NR19_C75 | ACSS2 Acetyl-coenzyme A synthetase, | 5155 |
| | cytoplasmic | |
| Q9Y2X0_C790 | MED16 Mediator of RNA polymerase | 5156 |
| | II transcription subunit | |
| Q9Y2X0_C801 | MED16 Mediator of RNA polymerase | 5157 |
| | II transcription subunit | |
| Q00325_C237 | SLC25A3 Phosphate carrier protein, | 5158 |
| | mitochondrial | |
| O95861_C243 | BPNT1 3(2),5-bisphosphate | 5159 |
| | nucleotidase 1 | |
| Q5VUA4_C475 | ZNF318 Zinc finger protein 318 | 5160 |
| Q8TDZ2_C837 | MICAL1 Protein-methionine sulfoxide | 5161 |
| | oxidase MICAL1 | |
| Q7RTV0_C61 | PHF5A PHD finger-like domain- | 5162 |
| | containing protein 5A | |
| Q9Y4R8_C644 | TELO2 Telomere length regulation | 5163 |
| | protein TEL2 homolog | |
| Q2PPJ7_C838 | RALGAPA2 Ral GTPase-activating | 5164 |
| | protein subunit alpha-2 | |
| P09382_C131 | LGALS1 Galectin-1 | 5165 |
| O95081_C30 | AGFG2 Arf-GAP domain and FG | 5166 |
| | repeat-containing protein 2 | |
| Q8WV74_C224 | NUDT8 Nucleoside diphosphate-linked | 5167 |
| | moiety X motif 8, mitochondrial | |
| Q86Y37_C166 | CACUL1 CDK2-associated and cullin | 5168 |
| | domain-containing prote | |
| O43414_C258 | ERI3 ERI1 exoribonuclease 3 | 5169 |
| Q6P0N0_C890 | MIS18BP1 Mis18-binding protein 1 | 5170 |
| Q5SW96_C286 | LDLRAP1 Low density lipoprotein | 5171 |
| | receptor adapter protein 1 | |
| Q96FW1_C212 | OTUB1 Ubiquitin thioesterase OTUB1 | 5172 |
| Q7Z7H8_C180 | MRPL10 39S ribosomal protein L10, | 5173 |
| | mitochondrial | |
| P21266_C208 | GSTM3 Glutathione S-transferase Mu 3 | 5174 |
| Q8N5F7_C47 | NKAP NF-kappa-B-activating protein | 5175 |
| Q00534_C83 | CDK6 Cyclin-dependent kinase 6 | 5176 |
| Q00537_C233 | CDK17 Cyclin-dependent kinase 17 | 5177 |
| Q13838_C300 | DDX39B Spliceosome RNA helicase | 5178 |
| | DDX39B | |
| Q9HB09_C266 | BCL2L12 Bcl-2-like protein 12 | 5179 |
| P13693_C172 | TPT1 Translationally-controlled tumor | 5180 |
| | protein | |
| Q9H6Q4_C300 | NARFL Cytosolic Fe—S cluster | 5181 |
| | assembly factor NARFL | |
| P05388_C226 | RPLP0 60S acidic ribosomal protein P0 | 5182 |
| P16885_C937 | PLCG2 1-phosphatidylinositol 4,5- | 5183 |
| | bisphosphate phosphodiesterase | |
| P16885_C1082 | PLCG2 1-phosphatidylinositol 4,5- | 5184 |
| | bisphosphate phosphodiesterase | |
| Q13905_C474 | RAPGEF1 Rap guanine nucleotide | 5185 |
| | exchange factor 1 | |
| O75439_C485 | PMPCB Mitochondrial-processing | 5186 |
| | peptidase subunit beta | |
| P43034_C168 | PAFAH1B1 Platelet-activating factor | 5187 |
| | acetylhydrolase IB subunit | |
| A6NDG6_C35 | PGP Phosphoglycolate phosphatase | 5188 |
| A6NDG6_C217 | PGP Phosphoglycolate phosphatase | 5189 |
| O60610_C314 | DIAPH1 Protein diaphanous homolog 1 | 5190 |
| Q92598_C167 | HSPH1 Heat shock protein 105 kDa | 5191 |
| Q13011_C92 | ECH1 Delta(3,5)-Delta(2,4)-dienoyl- | 5192 |
| | CoA isomerase, mitochondrial | |
| Q8NEM2_C591 | SHCBP1 SHC SH2 domain-binding | 5193 |
| | protein 1 | |
| Q9NRH3_C13 | TUBG2 Tubulin gamma-2 chain | 5194 |
| Q8NFC6_C1849 | BOD1L1 Biorientation of chromosomes | 5195 |
| | in cell division protein 1-like 1 | |
| Q7L8L6_C670 | FASTKD5 FAST kinase domain- | 5196 |
| | containing protein 5 | |
| Q13123_C263 | IK Protein Red | 5197 |
| Q9UPN3_C666 | MACF1 Microtubule-actin cross- | 5198 |
| | linking factor 1, isoforms | |
| Q9UPN3_C7245 | MACF1 Microtubule-actin cross- | 5199 |
| | linking factor 1, isoforms | |
| Q9UPN7_C689 | PPP6R1 Serine/threonine-protein | 5200 |
| | phosphatase 6 regulatory | |
| Q9UGP4_C374 | LIMD1 LIM domain-containing protein | 5201 |
| | 1 | |
| Q9UGP4_C401 | LIMD1 LIM domain-containing protein | 5202 |
| | 1 | |
| O75369_C183 | FLNB Filamin-B | 5203 |
| O75369_C604 | FLNB Filamin-B | 5204 |
| P40763_C687 | STAT3 Signal transducer and activator | 5205 |
| | of transcription 3 | |
| Q13347_C160 | EIF3I Eukaryotic translation initiation | 5206 |
| | factor 3 subunit | |
| Q96KG9_C210 | SCYL1 N-terminal kinase-like protein | 5207 |
| Q96KG9_C241 | SCYL1 N-terminal kinase-like protein | 5208 |
| P21980_C27 | TGM2 Protein-glutamine gamma- | 5209 |
| | glutamyltransferase 2 | |
| P21980_C524 | TGM2 Protein-glutamine gamma- | 5210 |
| | glutamyltransferase 2 | |
| Q9ULJ6_C81 | ZMIZ1 Zinc finger MIZ domain- | 5211 |
| | containing protein 1 | |
| P30519_C265 | HMOX2 Heme oxygenase 2 | 5212 |
| Q96RE7_C178 | NACC1 Nucleus accumbens-associated | 5213 |
| | protein 1 | |
| Q96RE7_C301 | NACC1 Nucleus accumbens-associated | 5214 |
| | protein 1 | |
| Q96GX9_C32 | APIP Probable methylthioribulose-1- | 5215 |
| | phosphate dehydratase | |
| P49792_C1335 | RANBP2 E3 SUMO-protein ligase | 5216 |
| | RanBP2 | |
| P49792_C2696 | RANBP2 E3 SUMO-protein ligase | 5217 |
| | RanBP2 | |
| P56545_C60 | CTBP2 C-terminal-binding protein 2 | 5218 |
| Q5SRE5_C1433 | NUP188 Nucleoporin NUP188 | 5219 |
| | homolog | |
| Q9P0L0_C128 | VAPA Vesicle-associated membrane | 5220 |
| | protein-associated protein A, 33 kDa | |
| Q9Y618_C2447 | NCOR2 Nuclear receptor corepressor 2 | 5221 |
| Q9Y617_C175 | PSAT1 Phosphoserine aminotransferase | 5222 |
| Q9Y617_C245 | PSAT1 Phosphoserine aminotransferase | 5223 |
| Q9UIA9_C244 | XPO7 Exportin-7 | 5224 |
| Q9H8U3_C118 | ZFAND3 AN1-type zinc finger protein | 5225 |
| | 3 | |
| O00506_C73 | STK25 Serine/threonine-protein kinase | 5226 |
| | 25 | |
| Q4G0N4_C311 | NADKD1 NAD kinase domain- | 5227 |
| | containing protein 1 | |
| Q4V328_C744 | GRIPAP1 GRIP1-associated protein 1 | 5228 |
| Q9BXP5_C479 | SRRT Serrate RNA effector molecule | 5229 |
| | homolog | |
| Q01581_C268 | HMGCS1 Hydroxymethylglutaryl-CoA | 5230 |
| | synthase, cytoplasmic | |
| P46013_C643 | MKI67 Antigen KI-67 | 5231 |
| P17858_C351 | PFKL 6-phosphofructokinase, liver | 5232 |
| | type | |
| Q9H7Z7_C110 | PTGES2 Prostaglandin E synthase 2 | 5233 |
| O75083_C194 | WDR1 WD repeat-containing protein 1 | 5234 |
| O43252_C127 | PAPSS1 Bifunctional 3- | 5235 |
| | phosphoadenosine 5-phosphosulfate | |
| | synthase 1 | |
| Q09028_C278 | RBBP4 Histone-binding protein | 5236 |
| | RBBP4 | |
| Q8WXH0_C1235 | SYNE2 Nesprin-2 | 5237 |
| Q9UPM8_C1119 | AP4E1 AP-4 complex subunit epsilon-1 | 5238 |
| P23368_C428 | ME2 NAD-dependent malic enzyme, | 5239 |
| | mitochondrial | |
| O95402_C598 | MED26 Mediator of RNA polymerase | 5240 |
| | II transcription subunit | |
| Q8TD19_C808 | NEK9 Serine/threonine-protein kinase | 5241 |
| | Nek9 | |
| P11216_C109 | PYGB Glycogen phosphorylase, brain | 5242 |
| | form | |
| P40938_C11 | RFC3 Replication factor C subunit 3 | 5243 |
| P40939_C110 | HADHA Trifunctional enzyme subunit | 5244 |
| | alpha, mitochondrial | |
| P40939_C550 | HADHA Trifunctional enzyme subunit | 5245 |
| | alpha, mitochondrial | |
| Q8NCW5_C127 | APOA1BP NAD(P)H-hydrate | 5246 |
| | epimerase | |
| Q13356_C15 | PPIL2 Peptidyl-prolyl cis-trans | 5247 |
| | isomerase-like 2 | |
| Q5F1R6_C3 | DNAJC21 DnaJ homolog subfamily C | 5248 |
| | member 21 | |
| P40337_C77 | VHL Von Hippel-Lindau disease tumor | 5249 |
| | suppressor | |
| Q8N6R0_C226 | METTL13 Methyltransferase-like | 5250 |
| | protein 13 | |
| P39023_C336 | RPL3 60S ribosomal protein L3 | 5251 |
| P51610_C135 | HCFC1 Host cell factor 1 | 5252 |
| Q12800_C453 | TFCP2 Alpha-globin transcription | 5253 |
| | factor CP2 | |
| Q9Y281_C39 | CFL2 Cofilin-2 | 5254 |
| Q5T4S7_C1274 | UBR4 E3 ubiquitin-protein ligase | 5255 |
| | UBR4 | |
| Q5T4S7_C2222 | UBR4 E3 ubiquitin-protein ligase | 5256 |
| | UBR4 | |
| Q5T4S7_C4049 | UBR4 E3 ubiquitin-protein ligase | 5257 |
| | UBR4 | |
| O00154_C117 | ACOT7 Cytosolic acyl coenzyme A | 5258 |
| | thioester hydrolase | |
| Q53EZ4_C159 | CEP55 Centrosomal protein of 55 kDa | 5259 |
| Q5VV42_C138 | CDKAL1 Threonylcarbamoyladenosine | 5260 |
| | tRNA methylthiotransferase | |
| Q9P2A4_C145 | ABI3 ABI gene family member 3 | 5261 |
| Q9BRR8_C839 | GPATCH1 G patch domain-containing | 5262 |
| | protein 1 | |
| Q9Y3I0_C122 | C22orf28 tRNA-splicing ligase RtcB | 5263 |
| | homolog | |
| P28331_C92 | NDUFS1 NADH-ubiquinone | 5264 |
| | oxidoreductase 75 kDa subunit, | |
| | mitochondrial | |
| P62826_C122 | RAN GTP-binding nuclear protein Ran | 5265 |
| Q9BZE1_C153 | MRPL37 39S ribosomal protein L37, | 5266 |
| | mitochondrial | |
| P01033_C197 | TIMP1 Metalloproteinase inhibitor 1 | 5267 |
| Q99661_C610 | KIF2C Kinesin-like protein KIF2C | 5268 |
| Q99666_C1601 | RGPD6 RANBP2-like and GRIP | 5269 |
| | domain-containing protein 5/6 | |
| P24468_C343 | NR2F2 COUP transcription factor 2 | 5270 |
| O60701_C288 | UGDH UDP-glucose 6-dehydrogenase | 5271 |
| O43488_C214 | AKR7A2 Aflatoxin B1 aldehyde | 5272 |
| | reductase member 2 | |
| P53618_C102 | COPB1 Coatomer subunit beta | 5273 |
| Q8WV24_C148 | PHLDA1 Pleckstrin homology-like | 5274 |
| | domain family A member 1 | |
| Q8WV24_C266 | PHLDA1 Pleckstrin homology-like | 5275 |
| | domain family A member 1 | |
| Q8TEX9_C483 | IPO4 Importin-4 | 5276 |
| O95433_C301 | AHSA1 Activator of 90 kDa heat shock | 5277 |
| | protein ATPase homolog | |
| P49327_C1992 | FASN Fatty acid synthase | 5278 |
| Q99447_C30 | PCYT2 Ethanolamine-phosphate | 5279 |
| | cytidylyltransferase | |
| P49321_C254 | NASP Nuclear autoantigenic sperm | 5280 |
| | protein | |
| P14618_C165 | PKM Pyruvate kinase isozymes M1/M2 | 5281 |
| Q05655_C393 | PRKCD Protein kinase C delta type | 5282 |
| Q14012_C179 | CAMK1 Calcium/calmodulin- | 5283 |
| | dependent protein kinase type 1 | |
| Q15746_C1077 | MYLK Myosin light chain kinase, | 5284 |
| | smooth muscle | |
| O43353_C414 | RIPK2 Receptor-interacting | 5285 |
| | serine/threonine-protein kinase 2 | |
| P41091_C434 | EIF2S3 Eukaryotic translation initiation | 5286 |
| | factor 2 subunit | |
| Q9BQ39_C603 | DDX50 ATP-dependent RNA helicase | 5287 |
| | DDX50 | |
| P13489_C38 | RNH1 Ribonuclease inhibitor | 5288 |
| Q8TBC4_C70 | UBA3 NEDD8-activating enzyme E1 | 5289 |
| | catalytic subunit | |
| P25325_C65 | MPST 3-mercaptopyruvate | 5290 |
| | sulfurtransferase | |
| O15287_C392 | FANCG Fanconi anemia group G | 5291 |
| | protein | |
| P13804_C109 | ETFA Electron transfer flavoprotein | 5292 |
| | subunit alpha, mitochondrial | |
| P31153_C149 | MAT2A S-adenosylmethionine | 5293 |
| | synthase isoform type-2 | |
| Q86V48_C594 | LUZP1 Leucine zipper protein 1 | 5294 |
| Q9UKU7_C351 | ACAD8 Isobutyryl-CoA | 5295 |
| | dehydrogenase, mitochondrial | |
| Q12888_C772 | TP53BP1 Tumor suppressor p53- | 5296 |
| | binding protein 1 | |
| Q12888_C1796 | TP53BP1 Tumor suppressor p53- | 5297 |
| | binding protein 1 | |
| P14923_C511 | JUP Junction plakoglobin | 5298 |
| Q8NBJ5_C203 | GLT25D1 Procollagen | 5299 |
| | galactosyltransferase 1 | |
| Q7LDG7_C398 | RASGRP2 RAS guanyl-releasing | 5300 |
| | protein 2 | |
| Q56VL3_C27 | OCIAD2 OCIA domain-containing | 5301 |
| | protein 2 | |
| P01591_C123 | IGJ Immunoglobulin J chain | 5302 |
| Q9H1B7_C298 | IRF2BPL Interferon regulatory factor | 5303 |
| | 2-binding protein-lik | |
| O00522_C134 | KRIT1 Krev interaction trapped protein | 5304 |
| | 1 | |
| Q9BZZ5_C234 | API5 Apoptosis inhibitor 5 | 5305 |
| Q9H8G2_C226 | CAAP1 Caspase activity and apoptosis | 5306 |
| | inhibitor 1 | |
| O60711_C379 | LPXN Leupaxin | 5307 |
| Q6KC79_C279 | NIPBL Nipped-B-like protein | 5308 |
| Q92974_C335 | ARHGEF2 Rho guanine nucleotide | 5309 |
| | exchange factor 2 | |
| P43007_C109 | SLC1A4 Neutral amino acid transporter | 5310 |
| | A | |
| Q92973_C164 | TNPO1 Transportin-1 | 5311 |
| Q92973_C862 | TNPO1 Transportin-1 | 5312 |
| P54578_C359 | USP14 Ubiquitin carboxyl-terminal | 5313 |
| | hydrolase 14 | |
| Q92576_C561 | PHF3 PHD finger protein 3 | 5314 |
| Q13200_C285 | PSMD2 26S proteasome non-ATPase | 5315 |
| | regulatory subunit 2 | |
| P49336_C349 | CDK8 Cyclin-dependent kinase 8 | 5316 |
| Q8IVH4_C184 | MMAA Methylmalonic aciduria type A | 5317 |
| | protein, mitochondrial | |
| Q9GZR7_C832 | DDX24 ATP-dependent RNA helicase | 5318 |
| | DDX24 | |
| Q15149_C888 | PLEC Plectin | 5319 |
| Q15149_C1405 | PLEC Plectin | 5320 |
| Q15149_C3493 | PLEC Plectin | 5321 |
| Q15149_C3667 | PLEC Plectin | 5322 |
| P25787_C213 | PSMA2 Proteasome subunit alpha type- | 5323 |
| | 2 | |
| Q9ULW0_C198 | TPX2 Targeting protein for Xklp2 | 5324 |
| Q9UN19_C54 | DAPP1 Dual adapter for | 5325 |
| | phosphotyrosine and 3-phosphotyrosine | |
| | and 3-phosphoinositide | |
| P40261_C115 | NNMT Nicotinamide N- | 5326 |
| | methyltransferase | |
| Q9BWJ5_C41 | SF3B5 Splicing factor 3B subunit 5 | 5327 |
| Q9BR76_C345 | CORO1B Coronin-1B | 5328 |
| Q9HB40_C191 | SCPEP1 Retinoid-inducible serine | 5329 |
| | carboxypeptidase | |
| Q9BPZ3_C60 | PAIP2 Polyadenylate-binding protein- | 5330 |
| | interacting protein | |
| Q96F07_C1265 | CYFIP2 Cytoplasmic FMR1-interacting | 5331 |
| | protein 2 | |
| Q8TCG1_C583 | KIAA1524 Protein CIP2A | 5332 |
| O00442_C100 | RTCA RNA 3-terminal phosphate | 5333 |
| | cyclase | |
| P06132_C308 | UROD Uroporphyrinogen | 5334 |
| | decarboxylase | |
| Q9NTJ3_C260 | SMC4 Structural maintenance of | 5335 |
| | chromosomes protein 4 | |
| Q86UU0_C68 | BCL9L B-cell CLL/lymphoma 9-like | 5336 |
| | protein | |
| Q15031_C167 | LARS2 Probable leucine--tRNA ligase, | 5337 |
| | mitochondrial | |
| O15164_C394 | TRIM24 Transcription intermediary | 5338 |
| | factor 1-alpha | |
| Q5VT52_C222 | RPRD2 Regulation of nuclear pre- | 5339 |
| | mRNA domain-containing protein 2 | |
| P22314_C179 | UBA1 Ubiquitin-like modifier- | 5340 |
| | activating enzyme 1 | |
| Q53GQ0_C215 | HSD17B12 Estradiol 17-beta- | 5341 |
| | dehydrogenase 12 | |
| P78527_C223 | PRKDC DNA-dependent protein kinase | 5342 |
| | catalytic subunit | |
| P78527_C1629 | PRKDC DNA-dependent protein kinase | 5343 |
| | catalytic subunit | |
| P42566_C824 | EPS15 Epidermal growth factor | 5344 |
| | receptor substrate 15 | |
| Q5VUJ6_C256 | LRCH2 Leucine-rich repeat and | 5345 |
| | calponin homology domain-containing | |
| | 2 | |
| Q9H4I2_C11 | ZHX3 Zinc fingers and homeoboxes | 5346 |
| | protein 3 | |
| Q9H4I2_C335 | ZHX3 Zinc fingers and homeoboxes | 5347 |
| | protein 3 | |
| P42695_C631 | NCAPD3 Condensin-2 complex subunit | 5348 |
| | D3 | |
| Q96HE7_C104 | ERO1L ERO1-like protein alpha | 5349 |
| Q53HL2_C273 | CDCA8 Borealin | 5350 |
| Q9Y2L5_C265 | TRAPPC8 Trafficking protein particle | 5351 |
| | complex subunit 8 | |
| Q04721_C2085 | NOTCH2 Neurogenic locus notch | 5352 |
| | homolog protein 2 | |
| Q04726_C26 | TLE3 Transducin-like enhancer protein | 5353 |
| | 3 | |
| Q6P2E9_C838 | EDC4 Enhancer of mRNA-decapping | 5354 |
| | protein 4 | |
| Q99567_C454 | NUP88 Nuclear pore complex protein | 5355 |
| | Nup88 | |
| P49189_C45 | ALDH9A1 4- | 5356 |
| | trimethylaminobutyraldehyde | |
| | dehydrogenase | |
| Q14789_C3070 | GOLGB1 Golgin subfamily B member | 5357 |
| | 1 | |
| Q14789_C3144 | GOLGB1 Golgin subfamily B member | 5358 |
| | 1 | |
| O43592_C38 | XPOT Exportin-T | 5359 |
| O43592_C938 | XPOT Exportin-T | 5360 |
| Q9NUQ8_C102 | ABCF3 ATP-binding cassette sub- | 5361 |
| | family F member 3 | |
| P20810_C328 | CAST Calpastatin | 5362 |
| P33176_C174 | KIF5B Kinesin-1 heavy chain | 5363 |
| Q9GZQ3_C117 | COMMD5 COMM domain-containing | 5364 |
| | protein 5 | |
| P49454_C2415 | CENPF Centromere protein F | 5365 |
| Q76N89_C1574 | HECW1 E3 ubiquitin-protein ligase | 5366 |
| | HECW1 | |
| Q9NQZ5_C362 | STARD7 StAR-related lipid transfer | 5367 |
| | protein 7, mitochondrial | |
| Q9BQ15_C99 | NABP2 SOSS complex subunit B1 | 5368 |
| Q12905_C37 | ILF2 Interleukin enhancer-binding | 5369 |
| | factor 2 | |
| P04406_C158 | GAPDH Glyceraldehyde-3-phosphate | 5370 |
| | dehydrogenase | |
| P11177_C306 | PDHB Pyruvate dehydrogenase E1 | 5371 |
| | component subunit beta, | |
| E7EQZ4_C60 | SMN1 Survival motor neuron protein | 5372 |
| Q6UN15_C216 | FIP1L1 Pre-mRNA 3-end-processing | 5373 |
| | factor FIP1 | |
| Q96GJ1_C289 | TRMT2B tRNA (uracil(54)-C(5))- | 5374 |
| | methyltransferase homolog | |
| Q9UEW8_C450 | STK39 STE20/SPS1-related proline- | 5375 |
| | alanine-rich protein kinase | |
| Q15785_C236 | TOMM34 Mitochondrial import | 5376 |
| | receptor subunit TOM34 | |
| Q5T160_C11 | RARS2 Probable arginine--tRNA | 5377 |
| | ligase, mitochondrial | |
| P40692_C142 | MLH1 DNA mismatch repair protein | 5378 |
| | Mlh1 | |
| Q15283_C314 | RASA2 Ras GTPase-activating protein | 5379 |
| | 2 | |
| Q96I25_C302 | RBM17 Splicing factor 45 | 5380 |
| Q96I25_C385 | RBM17 Splicing factor 45 | 5381 |
| Q15334_C505 | LLGL1 Lethal(2) giant larvae protein | 5382 |
| | homolog 1 | |
| Q712K3_C191 | UBE2R2 Ubiquitin-conjugating | 5383 |
| | enzyme E2 R2 | |
| O95373_C90 | IPO7 Importin-7 | 5384 |
| Q9BV44_C426 | THUMPD3 THUMP domain- | 5385 |
| | containing protein 3 | |
| O14578_C105 | CIT Citron Rho-interacting kinase | 5386 |
| O14579_C34 | COPE Coatomer subunit epsilon | 5387 |
| Q9NXW9_C204 | ALKBH4 Probable alpha-ketoglutarate- | 5388 |
| | dependent dioxygenase | |
| Q9Y2H0_C736 | DLGAP4 Disks large-associated protein | 5389 |
| | 4 | |
| Q96CV9_C239 | OPTN Optineurin | 5390 |
| Q9Y3L3_C102 | SH3BP1 SH3 domain-binding protein 1 | 5391 |
| Q96EV2_C1093 | RBM33 RNA-binding protein 33 | 5392 |
| Q9UM54_C1102 | MYO6 Unconventional myosin-VI | 5393 |
| Q15027_C64 | ACAP1 Arf-GAP with coiled-coil, | 5394 |
| | ANK repeat and PH domain | |
| O00541_C391 | PES1 Pescadillo homolog | 5395 |
| Q9Y277_C36 | VDAC3 Voltage-dependent anion- | 5396 |
| | selective channel protein | |
| Q9Y277_C229 | VDAC3 Voltage-dependent anion- | 5397 |
| | selective channel protein | |
| Q8NI27_C743 | THOC2 THO complex subunit 2 | 5398 |
| O76094_C349 | SRP72 Signal recognition particle 72 | 5399 |
| | kDa protein | |
| Q14315_C1348 | FLNC Filamin-C | 5400 |
| Q14315_C1735 | FLNC Filamin-C | 5401 |
| Q09666_C1967 | AHNAK Neuroblast differentiation- | 5402 |
| | associated protein AHNA | |
| P14621_C22 | ACYP2 Acylphosphatase-2 | 5403 |
| Q12974_C101 | PTP4A2 Protein tyrosine phosphatase | 5404 |
| | type IVA 2 | |
| O75334_C143 | PPFIA2 Liprin-alpha-2 | 5405 |
| O14979_C277 | HNRPDL Heterogeneous nuclear | 5406 |
| | ribonucleoprotein D-like | |
| Q8WUM0_C1037 | NUP133 Nuclear pore complex protein | 5407 |
| | Nup133 | |
| Q96PN7_C876 | TRERF1 Transcriptional-regulating | 5408 |
| | factor 1 | |
| Q9H9A6_C54 | LRRC40 Leucine-rich repeat- | 5409 |
| | containing protein 40 | |
| Q01167_C357 | FOXK2 Forkhead box protein K2 | 5410 |
| Q13310_C128 | PABPC4 Polyadenylate-binding protein | 5411 |
| | 4 | |
| P06493_C119 | CDK1 Cyclin-dependent kinase 1 | 5412 |
| P62937_C52 | PPIA Peptidyl-prolyl cis-trans | 5413 |
| | isomerase A | |
| Q9UBQ5_C190 | EIF3K Eukaryotic translation initiation | 5414 |
| | factor 3 subunit | |
| Q9NY93_C298 | DDX56 Probable ATP-dependent RNA | 5415 |
| | helicase DDX56 | |
| P50453_C370 | SERPINB9 Serpin B9 | 5416 |
| P12236_C160 | SLC25A6 ADP/ATP translocase 3 | 5417 |
| Q6ZRQ5_C1068 | MMS22L Protein MMS22-like | 5418 |
| Q9BYI3_C371 | FAM126A Hyccin | 5419 |
| P51148_C64 | RAB5C Ras-related protein Rab-5C | 5420 |
| P09110_C87 | ACAA1 3-ketoacyl-CoA thiolase, | 5421 |
| | peroxisomal | |
| Q9UL15_C118 | BAG5 BAG family molecular | 5422 |
| | chaperone regulator 5 | |
| Q9UL12_C497 | SARDH Sarcosine dehydrogenase, | 5423 |
| | mitochondrial | |
| Q96CG3_C169 | TIFA TRAF-interacting protein with | 5424 |
| | FHA domain-containing | |
| O60841_C853 | EIF5B Eukaryotic translation initiation | 5425 |
| | factor 5B | |
| Q15306_C19 | IRF4 Interferon regulatory factor 4 | 5426 |
| Q9Y265_C94 | RUVBL1 RuvB-like 1 | 5427 |
| Q9Y263_C193 | PLAA Phospholipase A-2-activating | 5428 |
| | protein | |
| Q9UBZ4_C27 | APEX2 DNA-(apurinic or apyrimidinic | 5429 |
| | site) lyase 2 | |
| O75528_C255 | TADA3 Transcriptional adapter 3 | 5430 |
| Q14997_C710 | PSME4 Proteasome activator complex | 5431 |
| | subunit 4 | |
| Q9P107_C895 | GMIP GEM-interacting protein | 5432 |
| P35579_C740 | MYH9 Myosin-9 | 5433 |
| Q8TAQ2_C91 | SMARCC2 SWI/SNF complex subunit | 5434 |
| | SMARCC2 | |
| O14966_C120 | RAB7L1 Ras-related protein Rab-7L1 | 5435 |
| Q13325_C137 | IFIT5 Interferon-induced protein with | 5436 |
| | tetratricopeptide | |
| Q7Z7A3_C290 | CTU1 Cytoplasmic tRNA 2-thiolation | 5437 |
| | protein 1 | |
| Q9ULT8_C2579 | HECTD1 E3 ubiquitin-protein ligase | 5438 |
| | HECTD1 | |
| Q0VG06_C15 | FAAP100 Fanconi anemia-associated | 5439 |
| | protein of 100 kDa | |
| Q13439_C1253 | GOLGA4 Golgin subfamily A member | 5440 |
| | 4 | |
| Q9UPT9_C494 | USP22 Ubiquitin carboxyl-terminal | 5441 |
| | hydrolase 22 | |
| Q9HCJ3_C362 | RAVER2 Ribonucleoprotein PTB- | 5442 |
| | binding 2 | |
| O60306_C28 | AQR Intron-binding protein aquarius | 5443 |
| Q92879_C61 | CELF1 CUGBP Elav-like family | 5444 |
| | member 1 | |
| P10620_C50 | MGST1 Microsomal glutathione S- | 5445 |
| | transferase 1 | |
| P01892_C125 | HLA-A HLA class I histocompatibility | 5446 |
| | antigen, A-2 alpha | |
| Q9Y312_C370 | AAR2 Protein AAR2 homolog | 5447 |
| P55265_C392 | ADAR Double-stranded RNA-specific | 5448 |
| | adenosine deaminase | |
| P60900_C78 | PSMA6 Proteasome subunit alpha type- | 5449 |
| | 6 | |
| Q63ZY3_C249 | KANK2 KN motif and ankyrin repeat | 5450 |
| | domain-containing protein 2 | |
| Q63ZY3_C412 | KANK2 KN motif and ankyrin repeat | 5451 |
| | domain-containing protein | |
| O95159_C230 | ZFPL1 Zinc finger protein-like 1 | 5452 |
| P62873_C294 | GNB1 Guanine nucleotide-binding | 5453 |
| | protein G(I)/G(S)/G(T) | |
| O00567_C211 | NOP56 Nucleolar protein 56 | 5454 |
| Q15003_C397 | NCAPH Condensin complex subunit 2 | 5455 |
| Q9C0C2_C136 | TNKS1BP1 182 kDa tankyrase-1- | 5456 |
| | binding protein | |
| Q9C0C9_C1099 | UBE2O Ubiquitin-conjugating enzyme | 5457 |
| | E2 O | |
| Q12841_C233 | FSTL1 Follistatin-related protein 1 | 5458 |
| O75533_C1244 | SF3B1 Splicing factor 3B subunit 1 | 5459 |
| O75534_C106 | CSDE1 Cold shock domain-containing | 5460 |
| | protein E1 | |
| E7EVK2_C211 | MTG1 Mitochondrial GTPase 1 | 5461 |
| Q13158_C168 | FADD Protein FADD | 5462 |
| Q9NRA8_C125 | EIF4ENIF1 Eukaryotic translation | 5463 |
| | initiation factor 4E transporter | |
| Q13155_C205 | AIMP2 Aminoacyl tRNA synthase | 5464 |
| | complex-interacting multifunctional | |
| | protein 2 | |
| Q14192_C10 | FHL2 Four and a half LIM domains | 5465 |
| | protein 2 | |
| Q8TEU7_C93 | RAPGEF6 Rap guanine nucleotide | 5466 |
| | exchange factor 6 | |
| Q14204_C978 | DYNC1H1 Cytoplasmic dynein 1 | 5467 |
| | heavy chain 1 | |
| Q14204_C4644 | DYNC1H1 Cytoplasmic dynein 1 | 5468 |
| | heavy chain 1 | |
| O60684_C296 | KPNA6 Importin subunit alpha-7 | 5469 |
| Q92844_C318 | TANK TRAF family member- | 5470 |
| | associated NF-kappa-B activator | |
| Q9Y4H4_C160 | GPSM3 G-protein-signaling modulator | 5471 |
| | 3 | |
| Q8WXI9_C423 | GATAD2B Transcriptional repressor | 5472 |
| | p66-beta | |
| P22102_C93 | GART Trifunctional purine | 5473 |
| | biosynthetic protein adenosine | |
| P32320_C102 | CDA Cytidine deaminase | 5474 |
| Q13085_C1116 | ACACA Acetyl-CoA carboxylase 1 | 5475 |
| Q14511_C18 | NEDD9 Enhancer of filamentation 1 | 5476 |
| O95551_C273 | TDP2 Tyrosyl-DNA phosphodiesterase | 5477 |
| | 2 | |
| Q13330_C68 | MTA1 Metastasis-associated protein | 5478 |
| | MTA1 | |
| A6NJ78_C172 | METTL15 Probable methyltransferase- | 5479 |
| | like protein 15 | |
| O43491_C424 | EPB41L2 Band 4.1-like protein 2 | 5480 |
| P82663_C141 | MRPS25 28S ribosomal protein S25, | 5481 |
| | mitochondrial | |
| Q13428_C1012 | TCOF1 Treacle protein | 5482 |
| Q5JSP0_C43 | FGD3 FYVE, RhoGEF and PH | 5483 |
| | domain-containing protein 3 | |
| Q14847_C32 | LASP1 LIM and SH3 domain protein 1 | 5484 |
| Q9UHB7_C315 | AFF4 AF4/FMR2 family member 4 | 5485 |
| P48735_C402 | IDH2 Isocitrate dehydrogenase | 5486 |
| Q2TAL8_C529 | QRICH1 Glutamine-rich protein 1 | 5487 |
| Q9UJM3_C124 | ERRFI1 ERBB receptor feedback | 5488 |
| | inhibitor 1 | |
| Q7L1V2_C87 | MON1B Vacuolar fusion protein | 5489 |
| | MON1 homolog B | |
| Q96KP4_C205 | CNDP2 Cytosolic non-specific | 5490 |
| | dipeptidase | |
| P62136_C62 | PPP1CA Serine/threonine-protein | 5491 |
| | phosphatase PP1-alpha catalytic subunit | |
| | alpha | |
| P13984_C116 | GTF2F2 General transcription factor | 5492 |
| | IIF subunit 2 | |
| Q7L775_C337 | EPM2AIP1 EPM2A-interacting protein | 5493 |
| | 1 | |
| P55209_C258 | NAP1L1 Nucleosome assembly protein | 5494 |
| | 1-like 1 | |
| Q9NQR4_C146 | NIT2 Omega-amidase NIT2 | 5495 |
| Q13459_C1279 | MYO9B Unconventional myosin-IXb | 5496 |
| Q9NVX0_C118 | HAUS2 HAUS augmin-like complex | 5497 |
| | subunit 2 | |
| Q969S9_C248 | GFM2 Ribosome-releasing factor 2, | 5498 |
| | mitochondrial | |
| P14866_C260 | HNRNPL Heterogeneous nuclear | 5499 |
| | ribonucleoprotein L | |
| Q13569_C233 | TDG G/T mismatch-specific thymine | 5500 |
| | DNA glycosylase | |
| O95239_C28 | KIF4A Chromosome-associated kinesin | 5501 |
| | KIF4A | |
| Q71RC2_C599 | LARP4 La-related protein 4 | 5502 |
| Q71RC2_C623 | LARP4 La-related protein 4 | 5503 |
| P29590_C80 | PML Protein PML | 5504 |
| P29590_C151 | PML Protein PML | 5505 |
| P29590_C189 | PML Protein PML | 5506 |
| P29590_C227 | PML Protein PML | 5507 |
| P29590_C479 | PML Protein PML | 5508 |
| Q09472_C1621 | EP300 Histone acetyltransferase p300 | 5509 |
| O15235_C93 | MRPS12 28S ribosomal protein S12, | 5510 |
| | mitochondrial | |
| P24534_C161 | EEF1B2 Elongation factor 1-beta | 5511 |
| P54819_C92 | AK2 Adenylate kinase 2, mitochondrial | 5512 |
| Q9Y333_C26 | LSM2 U6 snRNA-associated Sm-like | 5513 |
| | protein LSm2 | |
| Q9UER7_C427 | DAXX Death domain-associated | 5514 |
| | protein 6 | |
| Q3KQU3_C373 | MAP7D1 MAP7 domain-containing | 5515 |
| | protein 1 | |
| Q8N0W3_C129 | FUK L-fucose kinase | 5516 |
| Q16401_C361 | PSMD5 26S proteasome non-ATPase | 5517 |
| | regulatory subunit 5 | |
| Q99590_C478 | SCAF11 Protein SCAF11 | 5518 |
| Q9BYX2_C686 | TBC1D2 TBC1 domain family member | 5519 |
| | 2A | |
| A2A288_C64 | ZC3H12D Probable ribonuclease | 5520 |
| | ZC3H12D | |
| Q9UBR2_C214 | CTSZ Cathepsin Z | 5521 |
| Q5U5Q3_C319 | MEX3C RNA-binding E3 ubiquitin- | 5522 |
| | protein ligase MEX3C | |
| O95059_C31 | RPP14 Ribonuclease P protein subunit | 5523 |
| | p14 | |
| Q9NV56_C170 | MRGBP MRG-binding protein | 5524 |
| O14617_C574 | AP3D1 AP-3 complex subunit delta-1 | 5525 |
| Q14980_C1937 | NUMA1 Nuclear mitotic apparatus | 5526 |
| | protein 1 | |
| Q9BYV9_C698 | BACH2 Transcription regulator protein | 5527 |
| | BACH2 | |
| P55072_C184 | VCP Transitional endoplasmic | 5528 |
| | reticulum ATPase | |
| P55072_C209 | VCP Transitional endoplasmic | 5529 |
| | reticulum ATPase | |
| Q01433_C848 | AMPD2 AMP deaminase 2 | 5530 |
| P55211_C172 | CASP9 Caspase-9 | 5531 |
| Q08378_C455 | GOLGA3 Golgin subfamily A member | 5532 |
| | 3 | |
| Q12912_C264 | LRMP Lymphoid-restricted membrane | 5533 |
| | protein | |
| Q07021_C186 | C1QBP Complement component 1 Q | 5534 |
| | subcomponent-binding protein | |
| Q9NSE4_C414 | IARS2 Isoleucine--tRNA ligase, | 5535 |
| | mitochondrial | |
| Q9NSE4_C883 | IARS2 Isoleucine--tRNA ligase, | 5536 |
| | mitochondrial | |
| P14854_C30 | COX6B1 Cytochrome c oxidase | 5537 |
| | subunit 6B1 | |
| Q96ER3_C430 | SAAL1 Protein SAAL1 | 5538 |
| P08238_C592 | HSP90AB1 Heat shock protein HSP | 5539 |
| | 90-beta | |
| Q8IZ69_C551 | TRMT2A tRNA (uracil-5-)- | 5540 |
| | methyltransferase homolog A | |
| Q8NFX7_C120 | STXBP6 Syntaxin-binding protein 6 | 5541 |
| Q15118_C223 | PDK1 | 5542 |
| Q9P2J5_C1052 | LARS Leucine--tRNA ligase, | 5543 |
| | cytoplasmic | |
| Q9P2J5_C1053 | LARS Leucine--tRNA ligase, | 5544 |
| | cytoplasmic | |
| Q8TF72_C1331 | SHROOM3 Protein Shroom3 | 5545 |
| Q01415_C407 | GALK2 N-acetylgalactosamine kinase | 5546 |
| Q8IYL3_C124 | C1orf174 UPF0688 protein C1orf174 | 5547 |
| O43143_C644 | DHX15 Putative pre-mRNA-splicing | 5548 |
| | factor ATP-dependent RN | |
| Q99615_C247 | DNAJC7 DnaJ homolog subfamily C | 5549 |
| | member 7 | |
| Q05086_C843 | UBE3A Ubiquitin-protein ligase E3A | 5550 |
| P53667_C349 | LIMK1 LIM domain kinase 1 | 5551 |
| Q8IWV8_C1619 | UBR2 E3 ubiquitin-protein ligase | 5552 |
| | UBR2 | |
| Q96T51_C81 | RUFY1 RUN and FYVE domain- | 5553 |
| | containing protein 1 | |
| P13797_C209 | PLS3 Plastin-3 | 5554 |
| P39880_C802 | CUX1 Homeobox protein cut-like 1 | 5555 |
| Q53EL6_C288 | PDCD4 Programmed cell death protein | 5556 |
| | 4 | |
| P12277_C283 | CKB Creatine kinase B-type | 5557 |
| Q13617_C385 | CUL2 Cullin-2 | 5558 |
| Q8WXE1_C238 | ATRIP ATR-interacting protein | 5559 |
| Q8WXE1_C263 | ATRIP ATR-interacting protein | 5560 |
| Q7Z4Q2_C20 | HEATR3 HEAT repeat-containing | 5561 |
| | protein 3 | |
| Q15052_C564 | ARHGEF6 Rho guanine nucleotide | 5562 |
| | exchange factor 6 | |
| P49902_C181 | NT5C2 Cytosolic purine 5-nucleotidase | 5563 |
| P49903_C119 | SEPHS1 Selenide, water dikinase 1 | 5564 |
| Q53EP0_C442 | FNDC3B Fibronectin type III domain- | 5565 |
| | containing protein 3B | |
| Q92905_C218 | COPS5 COP9 signalosome complex | 5566 |
| | subunit 5 | |
| Q15121_C27 | PEA15 Astrocytic phosphoprotein | 5567 |
| | PEA-15 | |
| Q9Y315_C118 | DERA Putative deoxyribose-phosphate | 5568 |
| | aldolase | |
| O75909_C23 | CCNK Cyclin-K | 5569 |
| Q14232_C218 | EIF2B1 Translation initiation factor | 5570 |
| | eIF-2B subunit alpha | |
| P53582_C22 | METAP1 Methionine aminopeptidase 1 | 5571 |
| Q8WZ42_C5248 | TTN Titin | 5572 |
| Q6UB35_C828 | MTHFD1L Monofunctional C1- | 5573 |
| | tetrahydrofolate synthase, | |
| | mitochondrial | |
| O43516_C446 | WIPF1 WAS/WASL-interacting | 5574 |
| | protein family member 1 | |
| Q9UHB4_C486 | NDOR1 NADPH-dependent diflavin | 5575 |
| | oxidoreductase 1 | |
| P41252_C400 | IARS Isoleucine-tRNA ligase, | 5576 |
| | cytoplasmic | |
| Q9UHB6_C164 | LIMA1 LIM domain and actin-binding | 5577 |
| | protein 1 | |
| Q14141_C14 | SEPT6 Septin-6 | 5578 |
| Q14149_C307 | MORC3 MORC family CW-type zinc | 5579 |
| | finger protein 3 | |
| O75122_C528 | CLASP2 CLIP-associating protein 2 | 5580 |
| P46821_C905 | MAP1B Microtubule-associated protein | 5581 |
| | 1B | |
| P46821_C963 | MAP1B Microtubule-associated protein | 5582 |
| | 1B | |
| O60343_C295 | TBC1D4 TBC1 domain family member | 5583 |
| | 4 | |
| Q96C36_C232 | PYCR2 Pyrroline-5-carboxylate | 5584 |
| | reductase 2 | |
| P61011_C229 | SRP54 Signal recognition particle 54 | 5585 |
| | kDa protein | |
| Q9H223_C141 | EHD4 EH domain-containing protein 4 | 5586 |
| O14981_C1542 | BTAF1 TATA-binding protein- | 5587 |
| | associated factor 172 | |
| P13796_C283 | LCP1 Plastin-2 | 5588 |
| O95071_C691 | UBR5 E3 ubiquitin-protein ligase | 5589 |
| | UBR5 | |
| O95071_C2768 | UBR5 E3 ubiquitin-protein ligase | 5590 |
| | UBR5 | |
| Q9Y2L1_C476 | DIS3 Exosome complex exonuclease | 5591 |
| | RRP44 | |
| A0FGR8_C181 | ESYT2 Extended synaptotagmin-2 | 5592 |
| P09960_C275 | LTA4H Leukotriene A-4 hydrolase | 5593 |
| Q06330_C454 | RBPJ Recombining binding protein | 5594 |
| | suppressor of hairless | |
| O14519_C105 | CDK2AP1 Cyclin-dependent kinase 2- | 5595 |
| | associated protein 1 | |
| Q15545_C72 | TAF7 Transcription initiation factor | 5596 |
| | TFIID subunit 7 | |
| Q15545_C92 | TAF7 Transcription initiation factor | 5597 |
| | TFIID subunit 7 | |
| Q15543_C38 | TAF13 Transcription initiation factor | 5598 |
| | TFIID subunit 13 | |
| Q6P587_C22 | FAHD1 Acylpyruvase FAHD1, | 5599 |
| | mitochondrial | |
| P51649_C93 | ALDH5A1 Succinate-semialdehyde | 5600 |
| | dehydrogenase, mitochondrial | |
| Q15048_C15 | LRRC14 Leucine-rich repeat- | 5601 |
| | containing protein 14 | |
| Q15042_C117 | RAB3GAP1 Rab3 GTPase-activating | 5602 |
| | protein catalytic subunit | |
| Q15042_C873 | RAB3GAP1 Rab3 GTPase-activating | 5603 |
| | protein catalytic subunit | |
| Q6R327_C1631 | RICTOR Rapamycin-insensitive | 5604 |
| | companion of mTOR | |
| P49915_C530 | GMPS GMP synthase | 5605 |
| Q9Y2K7_C840 | KDM2A Lysine-specific demethylase | 5606 |
| | 2A | |
| P00973_C25 | OAS1 2-5-oligoadenylate synthase 1 | 5607 |
| Q01780_C651 | EXOSC10 Exosome component 10 | 5608 |
| P12268_C468 | IMPDH2 Inosine-5-monophosphate | 5609 |
| | dehydrogenase 2 | |
| P07437_C129 | TUBB Tubulin beta chain | 5610 |
| Q01658_C94 | DR1 Protein Dr1 | 5611 |
| Q9Y490_C29 | TLN1 Talin-1 | 5612 |
| Q9Y490_C1478 | TLN1 Talin-1 | 5613 |
| P43243_C821 | MATR3 Matrin-3 | 5614 |
| Q86W50_C253 | METTL16 Methyltransferase-like | 5615 |
| | protein 16 | |
| P49005_C447 | POLD2 DNA polymerase delta subunit | 5616 |
| | 2 | |
| Q9H3H3_C199 | C11orf68 UPF0696 protein C11orf68 | 5617 |
| P27708_C484 | CAD CAD protein | 5618 |
| Q709C8_C1481 | VPS13C Vacuolar protein sorting- | 5619 |
| | associated protein 13C | |
| P23497_C373 | SP100 Nuclear autoantigen Sp-100 | 5620 |
| Q9NXV2_C25 | KCTD5 BTB/POZ domain-containing | 5621 |
| | protein KCTD5 | |
| Q05209_C470 | PTPN12 Tyrosine-protein phosphatase | 5622 |
| | non-receptor type 12 | |
| Q9P258_C305 | RCC2 Protein RCC2 | 5623 |
| Q8N3R9_C490 | MPP5 MAGUK p55 subfamily member | 5624 |
| | 5 | |
| Q13464_C29 | ROCK1 Rho-associated protein kinase | 5625 |
| | 1 | |
| Q7L5Y9_C195 | MAEA Macrophage erythroblast | 5626 |
| | attacher | |
| O15446_C150 | CD3EAP DNA-directed RNA | 5627 |
| | polymerase I subunit RPA34 | |
| P54136_C36 | RARS Arginine--tRNA ligase, | 5628 |
| | cytoplasmic | |
| P54136_C638 | RARS Arginine--tRNA ligase, | 5629 |
| | cytoplasmic | |
| Q96F24_C155 | NRBF2 Nuclear receptor-binding factor | 5630 |
| | 2 | |
| Q9Y5L0_C527 | TNPO3 Transportin-3 | 5631 |
| Q86YV5_C444 | SGK223 Tyrosine-protein kinase | 5632 |
| | SgK223 | |
| O60502_C663 | MGEA5 Bifunctional protein NCOAT | 5633 |
| O60502_C896 | MGEA5 Bifunctional protein NCOAT | 5634 |
| Q13671_C223 | RIN1 Ras and Rab interactor 1 | 5635 |
| O95067_C131 | CCNB2 G2/mitotic-specific cyclin-B2 | 5636 |
| P38646_C608 | HSPA9 Stress-70 protein, | 5637 |
| | mitochondrial | |
| Q96MX6_C70 | WDR92 WD repeat-containing protein | 5638 |
| | 92 | |
| P49588_C901 | AARS Alanine--tRNA ligase, | 5639 |
| | cytoplasmic | |
| Q9HCC0_C391 | MCCC2 Methylcrotonoyl-CoA | 5640 |
| | carboxylase beta chain, mitochondrial | |
| P47755_C157 | CAPZA2 F-actin-capping protein | 5641 |
| | subunit alpha-2 | |
| Q8TDD1_C73 | DDX54 ATP-dependent RNA helicase | 5642 |
| | DDX54 | |
| P47897_C111 | QARS Glutamine--tRNA ligase | 5643 |
| P06730_C89 | EIF4E Eukaryotic translation initiation | 5644 |
| | factor 4E | |
| P06730_C136 | EIF4E Eukaryotic translation initiation | 5645 |
| | factor 4E | |
| Q7Z4W1_C150 | DCXR L-xylulose reductase | 5646 |
| Q96QB1_C532 | DLC1 Rho GTPase-activating protein 7 | 5647 |
| P30740_C344 | SERPINB1 Leukocyte elastase inhibitor | 5648 |
| O95758_C68 | PTBP3 Polypyrimidine tract-binding | 5649 |
| | protein 3 | |
| P00966_C132 | ASS1 Argininosuccinate synthase | 5650 |
| P62917_C115 | RPL8 60S ribosomal protein L8 | 5651 |
| Q00796_C106 | SORD Sorbitol dehydrogenase | 5652 |
| O75928_C346 | PIAS2 E3 SUMO-protein ligase PIAS2 | 5653 |
| Q8TF42_C367 | UBASH3B Ubiquitin-associated and | 5654 |
| | SH3 domain-containing protein | |
| Q9NVR7_C298 | TBCCD1 TBCC domain-containing | 5655 |
| | protein 1 | |
| Q9UK39_C302 | CCRN4L Nocturnin | 5656 |
| Q99627_C20 | COPS8 COP9 signalosome complex | 5657 |
| | subunit 8 | |
| Q9C0J8_C120 | WDR33 pre-mRNA 3 end processing | 5658 |
| | protein WDR33 | |
| Q6ZUJ8_C358 | PIK3AP1 Phosphoinositide 3-kinase | 5659 |
| | adapter protein 1 | |
| P23246_C431 | SFPQ Splicing factor, proline- and | 5660 |
| | glutamine-rich | |
| P48506_C501 | GCLC Glutamate--cysteine ligase | 5661 |
| | catalytic subunit | |
| Q04637_C821 | EIF4G1 Eukaryotic translation | 5662 |
| | initiation factor 4 gamma 1 | |
| P52701_C108 | MSH6 DNA mismatch repair protein | 5663 |
| | Msh6 | |
| P11310_C156 | ACADM Medium-chain specific acyl- | 5664 |
| | CoA dehydrogenase, mitochondrial | |
| Q96G03_C86 | PGM2 Phosphoglucomutase-2 | 5665 |
| Q9NZ32_C352 | ACTR10 Actin-related protein 10 | 5666 |
| P32119_C70 | PRDX2 Peroxiredoxin-2 | 5667 |
| Q5R3I4_C128 | TTC38 Tetratricopeptide repeat protein | 5668 |
| | 38 | |
| O43318_C513 | MAP3K7 Mitogen-activated protein | 5669 |
| | kinase kinase kinase 7 | |
| Q53H82_C21 | LACTB2 Beta-lactamase-like protein 2 | 5670 |
| P63165_C52 | SUMO1 Small ubiquitin-related | 5671 |
| | modifier 1 | |
| P33993_C566 | MCM7 DNA replication licensing | 5672 |
| | factor MCM7 | |
| P41567_C94 | EIF1 Eukaryotic translation initiation | 5673 |
| | factor 1 | |
| P22830_C395 | FECH Ferrochelatase, mitochondrial | 5674 |
| P36871_C160 | PGM1 Phosphoglucomutase-1 | 5675 |
| Q9H0D6_C29 | XRN2 5-3 exoribonuclease 2 | 5676 |
| P31751_C124 | AKT2 RAC-beta serine/threonine- | 5677 |
| | protein kinase | |
| P30622_C150 | CLIP1 CAP-Gly domain-containing | 5678 |
| | linker protein 1 | |
| Q06481_C133 | APLP2 Amyloid-like protein 2 | 5679 |
| Q9NR12_C311 | PDLIM7 PDZ and LIM domain protein | 5680 |
| | 7 | |
| A6NHR9_C505 | SMCHD1 Structural maintenance of | 5681 |
| | chromosomes flexible hinge domain | |
| | containing 1 | |
| A6NHR9_C1656 | SMCHD1 Structural maintenance of | 5682 |
| | chromosomes flexible hinge domain | |
| | containing 1 | |
| O75600_C134 | GCAT 2-amino-3-ketobutyrate | 5683 |
| | coenzyme A ligase, mitochondrial | |
| Q96IU2_C26 | ZBED3 Zinc finger BED domain- | 5684 |
| | containing protein 3 | |
| Q6PKG0_C1054 | LARP1 La-related protein 1 | 5685 |
| Q5VYS8_C343 | ZCCHC6 Terminal uridylyltransferase | 5686 |
| | 7 | |
| P35580_C382 | MYH10 Myosin-10 | 5687 |
| P49023_C546 | PXN Paxillin | 5688 |
| Q9NVS9_C72 | PNPO Pyridoxine-5-phosphate oxidase | 5689 |
| Q9NQG7_C547 | HPS4 Hermansky-Pudlak syndrome 4 | 5690 |
| | protein | |
| Q14289_C562 | PTK2B Protein-tyrosine kinase 2-beta | 5691 |
| Q96P47_C611 | AGAP3 Arf-GAP with GTPase, ANK | 5692 |
| | repeat and PH domain-containing | |
| | protein 3 | |
| Q92621_C921 | NUP205 Nuclear pore complex protein | 5693 |
| | Nup205 | |
| Q9BTA9_C615 | WAC WW domain-containing adapter | 5694 |
| | protein with coiled-coil | |
| Q02241_C165 | KIF23 Kinesin-like protein KIF23 | 5695 |
| Q02241_C412 | KIF23 Kinesin-like protein KIF23 | 5696 |
| P41229_C1047 | KDM5C Lysine-specific demethylase | 5697 |
| | 5C | |
| Q92538_C158 | GBF1 Golgi-specific brefeldin A- | 5698 |
| | resistance guanine nucleotide exchange | |
| | factor 1 | |
| Q9UEY8_C73 | ADD3 Gamma-adducin | 5699 |
| Q70J99_C448 | UNC13D Protein unc-13 homolog D | 5700 |
| P20339_C63 | RAB5A Ras-related protein Rab-5A | 5701 |
| Q9NZ08_C498 | ERAP1 Endoplasmic reticulum | 5702 |
| | aminopeptidase 1 | |
| Q9NZ09_C45 | UBAP1 Ubiquitin-associated protein 1 | 5703 |
| Q96IQ9_C75 | ZNF414 Zinc finger protein 414 | 5704 |
| Q96IQ9_C134 | ZNF414 Zinc finger protein 414 | 5705 |
| P55039_C270 | DRG2 Developmentally-regulated | 5706 |
| | GTP-binding protein 2 | |
| Q9H4A4_C254 | RNPEP Aminopeptidase B | 5707 |
| P15170_C453 | GSPT1 Eukaryotic peptide chain | 5708 |
| | release factor GTP-binding subunit | |
| | ERF3A | |
| O75152_C588 | ZC3H11A Zinc finger CCCH domain- | 5709 |
| | containing protein 11A | |
| Q9BWD1_C158 | ACAT2 Acetyl-CoA acetyltransferase, | 5710 |
| | cytosolic | |
| Q9UJX4_C203 | ANAPC5 Anaphase-promoting | 5711 |
| | complex subunit 5 | |
| Q96E11_C154 | MRRF Ribosome-recycling factor, | 5712 |
| | mitochondrial | |
| Q16666_C679 | IFI16 Gamma-interferon-inducible | 5713 |
| | protein 16 | |
| O00622_C100 | CYR61 Protein CYR61 | 5714 |
| O00629_C417 | KPNA4 Importin subunit alpha-4 | 5715 |
| P40227_C282 | CCT6A T-complex protein 1 subunit | 5716 |
| | zeta | |
| Q12830_C2697 | BPTF Nucleosome-remodeling factor | 5717 |
| | subunit BPTF | |
| P48960_C513 | CD97 CD97 antigen | 5718 |
| Q9NRZ9_C836 | HELLS Lymphoid-specific helicase | 5719 |
| P02765_C230 | AHSG Alpha-2-HS-glycoprotein | 5720 |
| Q9NTZ6_C545 | RBM12 RNA-binding protein 12 | 5721 |
| P20618_C89 | PSMB1 Proteasome subunit beta type-1 | 5722 |
| Q15365_C118 | PCBP1 Poly(rC)-binding protein 1 | 5723 |
| Q9BVL4_C629 | SELO Selenoprotein O | 5724 |
| B5ME19_C79 | EIF3CL Eukaryotic translation | 5725 |
| | initiation factor 3 subunit | |
| Q13905_C817 | RAPGEF1 Rap guanine nucleotide | 5726 |
| | exchange factor 1 | |
| P29401_C151 | TKT Transketolase | 5727 |
| P29401_C206 | TKT Transketolase | 5728 |
| P35244_C81 | RPA3 Replication protein A 14 kDa | 5729 |
| | subunit | |
| Q8WUB8_C57 | PHF10 PHD finger protein 10 | 5730 |
| P49711_C155 | CTCF Transcriptional repressor CTCF | 5731 |
| Q9UKL0_C35 | RCOR1 REST corepressor 1 | 5732 |
| Q92835_C506 | INPP5D Phosphatidylinositol 3,4,5- | 5733 |
| | trisphosphate 5-phosphase 1 | |
| Q9H3M7_C384 | TXNIP Thioredoxin-interacting protein | 5734 |
| Q92598_C650 | HSPH1 Heat shock protein 105 kDa | 5735 |
| Q09161_C36 | NCBP1 Nuclear cap-binding protein | 5736 |
| | subunit 1 | |
| Q99081_C129 | TCF12 Transcription factor 12 | 5737 |
| Q9Y4G6_C810 | TLN2 Talin-2 | 5738 |
| Q14566_C637 | MCM6 DNA replication licensing | 5739 |
| | factor MCM6 | |
| Q8NFQ8_C468 | TOR1AIP2 Torsin-1A-interacting | 5740 |
| | protein 2 | |
| Q15185_C20 | PTGES3 Prostaglandin E synthase 3 | 5741 |
| Q92619_C599 | HMHA1 Minor histocompatibility | 5742 |
| | protein HA-1 | |
| O94903_C15 | PROSC Proline synthase co-transcribed | 5743 |
| | bacterial homolog | |
| Q8N999_C294 | C12orf29 Uncharacterized protein | 5744 |
| | C12orf29 | |
| Q8NFC6_C2384 | BOD1L1 Biorientation of chromosomes | 5745 |
| | in cell division protein | |
| Q7L8L6_C689 | FASTKD5 FAST kinase domain- | 5746 |
| | containing protein 5 | |
| O43795_C779 | MYO1B Unconventional myosin-Ib | 5747 |
| Q9UPN3_C4388 | MACF1 Microtubule-actin cross- | 5748 |
| | linking factor 1, isoforms | |
| Q9UPN7_C455 | PPP6R1 Serine/threonine-protein | 5749 |
| | phosphatase 6 regulatory | |
| O75569_C106 | PRKRA Interferon-inducible double | 5750 |
| | stranded RNA-dependent | |
| Q9UPN9_C153 | TRIM33 E3 ubiquitin-protein ligase | 5751 |
| | TRIM33 | |
| Q9UPN9_C754 | TRIM33 E3 ubiquitin-protein ligase | 5752 |
| | TRIM33 | |
| Q9UPN9_{——}C786 | TRIM33 E3 ubiquitin-protein ligase | 5753 |
| | TRIM33 | |
| Q96HA1_C307 | POM121 Nuclear envelope pore | 5754 |
| | membrane protein POM 121 | |
| Q99460_C633 | PSMD1 26S proteasome non-ATPase | 5755 |
| | regulatory subunit 1 | |
| Q8WY36_C150 | BBX HMG box transcription factor | 5756 |
| | BBX | |
| Q8WY36_C712 | BBX HMG box transcription factor | 5757 |
| | BBX | |
| P40763_C468 | STAT3 Signal transducer and activator | 5758 |
| | of transcription 3 | |
| Q70E73_C847 | RAPH1 Ras-associated and pleckstrin | 5759 |
| | homology domains-containing protein 1 | |
| Q9BZQ8_C891 | FAM129A Protein Niban | 5760 |
| Q9NUU7_C224 | DDX19A ATP-dependent RNA | 5761 |
| | helicase DDX19A | |
| Q96KG9_C503 | SCYL1 N-terminal kinase-like protein | 5762 |
| Q96RU3_C248 | FNBP1 Formin-binding protein 1 | 5763 |
| Q14966_C1023 | ZNF638 Zinc finger protein 638 | 5764 |
| Q96FZ5_C12 | CMTM7 CKLF-like MARVEL | 5765 |
| | transmembrane domain-containing | |
| | protein 7 | |
| Q96FZ2_C97 | C3orf37 UPF0361 protein C3orf37 | 5766 |
| P49770_C194 | EIF2B2 Translation initiation factor | 5767 |
| | eIF-2B subunit beta | |
| P40306_C215 | PSMB10 Proteasome subunit beta type- | 5768 |
| | 10 | |
| O95639_C41 | CPSF4 Cleavage and polyadenylation | 5769 |
| | specificity factor subunit | |
| P25208_C89 | NFYB Nuclear transcription factor Y | 5770 |
| | subunit beta | |
| Q9BZ29_C628 | DOCK9 Dedicator of cytokinesis | 5771 |
| | protein 9 | |
| Q92688_C114 | ANP32B Acidic leucine-rich nuclear | 5772 |
| | phosphoprotein 32 family member B | |
| Q9H6R7_C507 | C2orf44 WD repeat-containing protein | 5773 |
| | C2orf44 | |
| O15067_C1044 | PFAS | 5774 |
| | Phosphoribosylformylglycinamidine | |
| | synthase | |
| P60891_C60 | PRPS1 Ribose-phosphate | 5775 |
| | pyrophosphokinase 1 | |
| Q86WN1_C449 | FCHSD1 FCH and double SH3 | 5776 |
| | domains protein 1 | |
| Q8TAA5_C97 | GRPEL2 GrpE protein homolog 2, | 5777 |
| | mitochondrial | |
| Q9NW64_C48 | RBM22 Pre-mRNA-splicing factor | 5778 |
| | RBM22 | |
| Q7Z4H7_C743 | HAUS6 HAUS augmin-like complex | 5779 |
| | subunit 6 | |
| Q13823_C336 | GNL2 Nucleolar GTP-binding protein 2 | 5780 |
| P49790_C148 | NUP153 Nuclear pore complex protein | 5781 |
| | Nup153 | |
| Q01813_C664 | PFKP 6-phosphofructokinase type C | 5782 |
| P49792_C503 | RANBP2 E3 SUMO-protein ligase | 5783 |
| | RanBP2 | |
| P49792_C3040 | RANBP2 E3 SUMO-protein ligase | 5784 |
| | RanBP2 | |
| Q00341_C104 | HDLBP Vigilin | 5785 |
| Q00610_C39 | CLTC Clathrin heavy chain 1 | 5786 |
| Q00610_C459 | CLTC Clathrin heavy chain 1 | 5787 |
| Q00610_C562 | CLTC Clathrin heavy chain 1 | 5788 |
| Q5SRE5_C585 | NUP188 Nucleoporin NUP188 | 5789 |
| | homolog | |
| Q9NVC6_C15 | MED17 Mediator of RNA polymerase | 5790 |
| | II transcription subunit | |
| Q9NVC6_C110 | MED17 Mediator of RNA polymerase | 5791 |
| | II transcription subunit | |
| Q96T76_C599 | MMS19 MMS19 nucleotide excision | 5792 |
| | repair protein homolog | |
| Q9Y618_C1297 | NCOR2 Nuclear receptor corepressor 2 | 5793 |
| Q9Y618_C2179 | NCOR2 Nuclear receptor corepressor 2 | 5794 |
| Q969T4_C145 | UBE2E3 Ubiquitin-conjugating enzyme | 5795 |
| | E2 E3 | |
| Q9Y613_C936 | FHOD1 FH1/FH2 domain-containing | 5796 |
| | protein 1 | |
| P09543_C111 | CNP 2,3-cyclic-nucleotide 3- | 5797 |
| | phosphodiesterase | |
| P32929_C252 | CTH Cystathionine gamma-lyase | 5798 |
| O75427_C283 | LRCH4 Leucine-rich repeat and | 5799 |
| | calponin homology domain-containing | |
| | 4 | |
| P07339_C110 | CTSD Cathepsin D | 5800 |
| Q92734_C80 | TFG Protein TFG | 5801 |
| Q00765_C118 | REEP5 Receptor expression-enhancing | 5802 |
| | protein 5 | |
| Q9Y4P8_C328 | WIPI2 WD repeat domain | 5803 |
| | phosphoinositide-interacting protein 2 | |
| Q4V328_C243 | GRIPAP1 GRIP1-associated protein 1 | 5804 |
| Q86UX6_C425 | STK32C Serine/threonine-protein | 5805 |
| | kinase 32C | |
| P43155_C169 | CRAT Carnitine O-acetyltransferase | 5806 |
| Q9BSJ8_C522 | ESYT1 Extended synaptotagmin-1 | 5807 |
| P35659_C161 | DEK Protein DEK | 5808 |
| P27695_C208 | APEX1 DNA-(apurinic or apyrimidinic | 5809 |
| | site) lyase | |
| P46013_C715 | MKI67 Antigen KI-67 | 5810 |
| P46013_C773 | MKI67 Antigen KI-67 | 5811 |
| Q9UJ70_C217 | NAGK N-acetyl-D-glucosamine kinase | 5812 |
| Q7Z5J4_C322 | RAI1 Retinoic acid-induced protein 1 | 5813 |
| Q9NRG7_C78 | SDR39U1 Epimerase family protein | 5814 |
| | SDR39U1 | |
| Q8WXH0_C6161 | SYNE2 Nesprin-2 | 5815 |
| Q8TC07_C686 | TBC1D15 TBC1 domain family | 5816 |
| | member 15 | |
| Q8N4N3_C254 | KLHL36 Kelch-like protein 36 | 5817 |
| Q99459_C769 | CDC5L Cell division cycle 5-like | 5818 |
| | protein | |
| P11216_C143 | PYGB Glycogen phosphorylase, brain | 5819 |
| | form | |
| Q6WCQ1_C831 | MPRIP Myosin phosphatase Rho- | 5820 |
| | interacting protein | |
| Q2TAZ0_C1458 | ATG2A Autophagy-related protein 2 | 5821 |
| | homolog A | |
| O43324_C147 | EEF1E1 Eukaryotic translation | 5822 |
| | elongation factor 1 epsilon | |
| Q96MF7_C140 | NSMCE2 E3 SUMO-protein ligase | 5823 |
| | NSE2 | |
| Q14653_C222 | IRF3 Interferon regulatory factor 3 | 5824 |
| Q15428_C56 | SF3A2 Splicing factor 3A subunit 2 | 5825 |
| Q9UJU2_C321 | LEF1 Lymphoid enhancer-binding | 5826 |
| | factor 1 | |
| P60953_C18 | CDC42 Cell division control protein 42 | 5827 |
| | homolog | |
| P60953_C81 | CDC42 Cell division control protein 42 | 5828 |
| | homolog | |
| Q9NYZ3_C539 | GTSE1 G2 and S phase-expressed | 5829 |
| | protein 1 | |
| Q9UHY7_C202 | ENOPH1 Enolase-phosphatase E1 | 5830 |
| O94768_C190 | STK17B Serine/threonine-protein | 5831 |
| | kinase 17B | |
| O15530_C21 | PDPK1 3-phosphoinositide-dependent | 5832 |
| | protein kinase 1 | |
| P21333_C810 | FLNA Filamin-A | 5833 |
| P21333_C1723 | FLNA Filamin-A | 5834 |
| P21333_C1865 | FLNA Filamin-A | 5835 |
| P21333_C2107 | FLNA Filamin-A | 5836 |
| Q9BWH6_C84 | RPAP1 RNA polymerase II-associated | 5837 |
| | protein 1 | |
| P51610_C292 | HCFC1 Host cell factor 1 | 5838 |
| P51610_C298 | HCFC1 Host cell factor 1 | 5839 |
| P51610_C1187 | HCFC1 Host cell factor 1 | 5840 |
| Q99683_C928 | MAP3K5 Mitogen-activated protein | 5841 |
| | kinase kinase kinase 5 | |
| Q9BWM7_C193 | SFXN3 Sideroflexin-3 | 5842 |
| Q96EM0_C205 | L3HYPDH Trans-L-3-hydroxyproline | 5843 |
| | dehydratase | |
| Q96SZ5_C258 | ADO 2-aminoethanethiol dioxygenase | 5844 |
| Q93100_C348 | PHKB Phosphorylase b kinase | 5845 |
| | regulatory subunit beta | |
| O75410_C715 | TACC1 Transforming acidic coiled- | 5846 |
| | coil-containing protein | |
| P35711_C492 | SOX5 Transcription factor SOX-5 | 5847 |
| Q9BXW9_C607 | FANCD2 Fanconi anemia group D2 | 5848 |
| | protein | |
| Q9Y4W2_C456 | LAS1L Ribosomal biogenesis protein | 5849 |
| | LAS1L | |
| P27635_C80 | RPL10 60S ribosomal protein L10 | 5850 |
| O95294_C611 | RASAL1 RasGAP-activating-like | 5851 |
| | protein 1 | |
| Q9Y4E6_C1103 | WDR7 WD repeat-containing protein 7 | 5852 |
| Q92616_C939 | GCN1L1 Translational activator GCN1 | 5853 |
| Q92615_C633 | LARP4B La-related protein 4B | 5854 |
| Q99661_C455 | KIF2C Kinesin-like protein KIF2C | 5855 |
| Q9Y4E8_C264 | USP15 Ubiquitin carboxyl-terminal | 5856 |
| | hydrolase 15 | |
| P24468_C213 | NR2F2 COUP transcription factor 2 | 5857 |
| P43490_C39 | NAMPT Nicotinamide | 5858 |
| | phosphoribosyltransferase | |
| Q8TE73_C4621 | DNAH5 Dynein heavy chain 5, | 5859 |
| | axonemal | |
| Q99996_C3868 | AKAP9 A-kinase anchor protein 9 | 5860 |
| P46060_C141 | RANGAP1 Ran GTPase-activating | 5861 |
| | protein 1 | |
| Q8WV28_C343 | BLNK B-cell linker protein | 5862 |
| Q8WV24_C242 | PHLDA1 Pleckstrin homology-like | 5863 |
| | domain family A member 1 | |
| P49327_C313 | FASN Fatty acid synthase | 5864 |
| P49327_C1881 | FASN Fatty acid synthase | 5865 |
| O75348_C104 | ATP6V1G1 V-type proton ATPase | 5866 |
| | subunit G 1 | |
| Q9UDR5_C342 | AASS Alpha-aminoadipic | 5867 |
| | semialdehyde synthase, mitochondrial | |
| Q13363_C312 | CTBP1 C-terminal-binding protein 1 | 5868 |
| O14929_C376 | HAT1 Histone acetyltransferase type B | 5869 |
| | catalytic subunit | |
| O14920_C464 | IKBKB Inhibitor of nuclear factor | 5870 |
| | kappa-B kinase subunit | |
| Q9NYK6_C73 | EURL Protein EURL homolog | 5871 |
| Q99536_C50 | VAT1 Synaptic vesicle membrane | 5872 |
| | protein VAT-1 homolog | |
| Q8N1G2_C9 | FTSJD2 Cap-specific mRNA | 5873 |
| | (nucleoside-2-O-)-methyltransfe | |
| Q96ME1_C459 | FBXL18 F-box/LRR-repeat protein 18 | 5874 |
| Q9BSQ5_C170 | CCM2 Malcavernin | 5875 |
| Q00688_C133 | FKBP3 Peptidyl-prolyl cis-trans | 5876 |
| | isomerase FKBP3 | |
| Q96FX7_C217 | TRMT61A tRNA (adenine(58)-N(1))- | 5877 |
| | methyltransferase catalytic subunit | |
| Q15691_C45 | MAPRE1 Microtubule-associated | 5878 |
| | protein RP/EB family member | |
| Q9NS87_C576 | KIF15 Kinesin-like protein KIF15 | 5879 |
| P13489_C220 | RNH1 Ribonuclease inhibitor | 5880 |
| Q9BPY3_C319 | FAM118B Protein FAM118B | 5881 |
| Q63HN8_C4348 | RNF213 E3 ubiquitin-protein ligase | 5882 |
| | RNF213 | |
| Q14839_C1018 | CHD4 Chromodomain-helicase-DNA- | 5883 |
| | binding protein 4 | |
| Q14839_C1019 | CHD4 Chromodomain-helicase-DNA- | 5884 |
| | binding protein 4 | |
| Q14839_C1121 | CHD4 Chromodomain-helicase-DNA- | 5885 |
| | binding protein 4 | |
| Q9HD33_C87 | MRPL47 39S ribosomal protein L47, | 5886 |
| | mitochondrial | |
| O14745_C206 | SLC9A3R1 Na(+)/H(+) exchange | 5887 |
| | regulatory cofactor NHE-RF1 | |
| O15287_C314 | FANCG Fanconi anemia group G | 5888 |
| | protein | |
| Q7L2J0_C429 | MEPCE 7SK snRNA methylphosphate | 5889 |
| | capping enzyme | |
| Q9BUK6_C561 | MSTO1 Protein misato homolog 1 | 5890 |
| Q9H5N1_C422 | RABEP2 Rab GTPase-binding effector | 5891 |
| | protein 2 | |
| Q7Z3K3_C1267 | POGZ Pogo transposable element with | 5892 |
| | ZNF domain | |
| Q96EN8_C558 | MOCOS Molybdenum cofactor | 5893 |
| | sulfurase | |
| P18074_C491 | ERCC2 TFIIH basal transcription factor | 5894 |
| | complex helicase | |
| Q9UKU7_C251 | ACAD8 Isobutyryl-CoA | 5895 |
| | dehydrogenase, mitochondrial | |
| Q96IY1_C175 | NSL1 Kinetochore-associated protein | 5896 |
| | NSL1 homolog | |
| Q06136_C121 | KDSR 3-ketodihydrosphingosine | 5897 |
| | reductase | |
| O75947_C101 | ATP5H ATP synthase subunit d, | 5898 |
| | mitochondrial | |
| P14921_C99 | ETS1 Protein C-ets-1 | 5899 |
| Q9NRY4_C924 | ARHGAP35 Rho GTPase-activating | 5900 |
| | protein 35 | |
| O60832_C74 | DKC1 H/ACA ribonucleoprotein | 5901 |
| | complex subunit 4 | |
| O95352_C524 | ATG7 Ubiquitin-like modifier- | 5902 |
| | activating enzyme ATG7 | |
| O95359_C2573 | TACC2 Transforming acidic coiled- | 5903 |
| | coil-containing protein | |
| Q6ZT12_C1858 | UBR3 E3 ubiquitin-protein ligase | 5904 |
| | UBR3 | |
| Q92990_C537 | GLMN Glomulin | 5905 |
| Q9Y383_C193 | LUC7L2 Putative RNA-binding protein | 5906 |
| | Luc7-like 2 | |
| O75400_C39 | PRPF40A Pre-mRNA-processing factor | 5907 |
| | 40 homolog A | |
| P00519_C1100 | ABL1 Tyrosine-protein kinase ABL1 | 5908 |
| P17676_C11 | CEBPB CCAAT/enhancer-binding | 5909 |
| | protein beta | |
| P53990_C125 | IST1 IST1 homolog | 5910 |
| P08729_C274 | KRT7 Keratin, type II cytoskeletal 7 | 5911 |
| O15357_C1187 | INPPL1 Phosphatidylinositol 3,4,5- | 5912 |
| | trisphosphate 5-phosphatase 2 | |
| Q8IX01_C970 | SUGP2 SURP and G-patch domain- | 5913 |
| | containing protein 2 | |
| Q9Y4D8_C1488 | HECTD4 Probable E3 ubiquitin-protein | 5914 |
| | ligase HECTD4 | |
| O60711_C376 | LPXN Leupaxin | 5915 |
| Q96IV0_C197 | NGLY1 Peptide-N(4)-(N-acetyl-beta- | 5916 |
| | glucosaminyl)asparagin | |
| P35637_C428 | FUS RNA-binding protein FUS | 5917 |
| Q6KC79_C1066 | NIPBL Nipped-B-like protein | 5918 |
| Q92973_C467 | TNPO1 Transportin-1 | 5919 |
| Q92973_C683 | TNPO1 Transportin-1 | 5920 |
| Q9BTE1_C160 | DCTN5 Dynactin subunit 5 | 5921 |
| P54577_C501 | YARS Tyrosine--tRNA ligase, | 5922 |
| | cytoplasmic | |
| O95218_C74 | ZRANB2 Zinc finger Ran-binding | 5923 |
| | domain-containing protein | |
| Q9NPI1_C367 | BRD7 Bromodomain-containing | 5924 |
| | protein 7 | |
| Q92576_C1771 | PHF3 PHD finger protein 3 | 5925 |
| Q92575_C186 | UBXN4 UBX domain-containing | 5926 |
| | protein 4 | |
| P24928_C13 | POLR2A DNA-directed RNA | 5927 |
| | polymerase II subunit RPB1 | |
| P24928_C451 | POLR2A DNA-directed RNA | 5928 |
| | polymerase II subunit RPB1 | |
| P24928_C1287 | POLR2A DNA-directed RNA | 5929 |
| | polymerase II subunit RPB1 | |
| Q8IVH4_C100 | MMAA Methylmalonic aciduria type A | 5930 |
| | protein, mitochondrial | |
| Q68E01_C596 | INTS3 Integrator complex subunit 3 | 5931 |
| Q15751_C2525 | HERC1 Probable E3 ubiquitin-protein | 5932 |
| | ligase HERC1 | |
| Q15751_C4811 | HERC1 Probable E3 ubiquitin-protein | 5933 |
| | ligase HERC1 | |
| Q8N680_C296 | ZBTB2 Zinc finger and BTB domain- | 5934 |
| | containing protein 2 | |
| Q13371_C35 | PDCL Phosducin-like protein | 5935 |
| Q9ULW3_C37 | ABT1 Activator of basal transcription 1 | 5936 |
| O95602_C613 | POLR1A DNA-directed RNA | 5937 |
| | polymerase I subunit RPA1 | |
| O95602_C1332 | POLR1A DNA-directed RNA | 5938 |
| | polymerase I subunit RPA1 | |
| O94776_C44 | MTA2 Metastasis-associated protein | 5939 |
| | MTA2 | |
| P61081_C111 | UBE2M NEDD8-conjugating enzyme | 5940 |
| | Ubc12 | |
| P85037_C665 | FOXK1 Forkhead box protein K1 | 5941 |
| P62263_C31 | RPS14 40S ribosomal protein S14 | 5942 |
| Q08945_C200 | SSRP1 FACT complex subunit SSRP1 | 5943 |
| Q9ULE6_C750 | PALD1 Paladin | 5944 |
| Q96F07_C223 | CYFIP2 Cytoplasmic FMR1-interacting | 5945 |
| | protein 2 | |
| Q15329_C121 | E2F5 Transcription factor E2F5 | 5946 |
| O95163_C213 | IKBKAP Elongator complex protein 1 | 5947 |
| Q6NXT1_C265 | ANKRD54 Ankyrin repeat domain- | 5948 |
| | containing protein 54 | |
| Q96EY5_C90 | FAM125A Multivesicular body subunit | 5949 |
| | 12A | |
| Q96CW6_C62 | SLC7A6OS Probable RNA polymerase | 5950 |
| | II nuclear localization protein | |
| Q7L1Q6_C349 | BZW1 Basic leucine zipper and W2 | 5951 |
| | domain-containing protein | |
| P15880_C188 | RPS2 40S ribosomal protein S2 | 5952 |
| Q5VT52_C88 | RPRD2 Regulation of nuclear pre- | 5953 |
| | mRNA domain-containing protein 2 | |
| Q9BZI7_C319 | UPF3B Regulator of nonsense | 5954 |
| | transcripts 3B | |
| Q9Y6K9_C131 | IKBKG NF-kappa-B essential | 5955 |
| | modulator | |
| P78527_C1507 | PRKDC DNA-dependent protein kinase | 5956 |
| | catalytic subunit | |
| P78527_C1791 | PRKDC DNA-dependent protein kinase | 5957 |
| | catalytic subunit | |
| P78537_C61 | BLOC1S1 Biogenesis of lysosome- | 5958 |
| | related organelles complex | |
| Q9Y6J0_C717 | CABIN1 Calcineurin-binding protein | 5959 |
| | cabin-1 | |
| Q15819_C69 | UBE2V2 Ubiquitin-conjugating | 5960 |
| | enzyme E2 variant 2 | |
| P52564_C38 | MAP2K6 Dual specificity mitogen- | 5961 |
| | activated protein kinase | |
| Q8N556_C684 | AFAP1 Actin filament-associated | 5962 |
| | protein 1 | |
| Q6P4F2_C151 | FDX1L Adrenodoxin-like protein, | 5963 |
| | mitochondrial | |
| O43598_C117 | RCL Deoxyribonucleoside 5- | 5964 |
| | monophosphate N-glycosidase | |
| P07996_C813 | THBS1 Thrombospondin-1 | 5965 |
| P07996_C946 | THBS1 Thrombospondin-1 | 5966 |
| P07996_C1167 | THBS1 Thrombospondin-1 | 5967 |
| P41182_C175 | BCL6 B-cell lymphoma 6 protein | 5968 |
| Q9BQC3_C251 | DPH2 Diphthamide biosynthesis | 5969 |
| | protein 2 | |
| O43572_C242 | AKAP10 A-kinase anchor protein 10, | 5970 |
| | mitochondrial | |
| Q96RQ3_C129 | MCCC1 Methylcrotonoyl-CoA | 5971 |
| | carboxylase subunit alpha, | |
| | mitochondrial | |
| Q96RQ3_C509 | MCCC1 Methylcrotonoyl-CoA | 5972 |
| | carboxylase subunit alpha, | |
| | mitochondrial | |
| Q9ULV4_C23 | CORO1C Coronin-1C | 5973 |
| Q7Z6M1_C29 | RABEPK Rab9 effector protein with | 5974 |
| | kelch motifs | |
| Q9NX38_C74 | FAM206A Protein FAM206A | 5975 |
| Q96HW7_C926 | INTS4 Integrator complex subunit 4 | 5976 |
| Q9HCD6_C431 | TANC2 Protein TANC2 | 5977 |
| Q13418_C239 | ILK Integrin-linked protein kinase | 5978 |
| P55036_C87 | PSMD4 26S proteasome non-ATPase | 5979 |
| | regulatory subunit 4 | |
| P62072_C29 | TIMM10 Mitochondrial import inner | 5980 |
| | membrane translocase subunit | |
| Q7Z2Z2_C474 | EFTUD1 Elongation factor Tu GTP- | 5981 |
| | binding domain-containing | |
| O00231_C257 | PSMD11 26S proteasome non-ATPase | 5982 |
| | regulatory subunit 11 | |
| P05023_C374 | ATP1A1 Sodium/potassium- | 5983 |
| | transporting ATPase subunit alpha | |
| P45985_C379 | MAP2K4 Dual specificity mitogen- | 5984 |
| | activated protein kinase | |
| P17029_C63 | ZKSCAN1 Zinc finger protein with | 5985 |
| | KRAB and SCAN domains 1 | |
| Q9BSW2_C341 | EFCAB4B EF-hand calcium-binding | 5986 |
| | domain-containing protein | |
| Q9P2R3_C34 | ANKFY1 Ankyrin repeat and FYVE | 5987 |
| | domain-containing protein | |
| Q9P2R3_C716 | ANKFY1 Ankyrin repeat and FYVE | 5988 |
| | domain-containing protein | |
| P31040_C536 | SDHA Succinate dehydrogenase | 5989 |
| P09104_C357 | ENO2 Gamma-enolase | 5990 |
| O76075_C108 | DFFB DNA fragmentation factor | 5991 |
| | subunit beta | |
| Q9P2D3_C1546 | HEATR5B HEAT repeat-containing | 5992 |
| | protein 5B | |
| Q9P2D6_C575 | FAM135A Protein FAM135A | 5993 |
| Q15334_C697 | LLGL1 Lethal(2) giant larvae protein | 5994 |
| | homolog 1 | |
| P17735_C332 | TAT Tyrosine aminotransferase | 5995 |
| Q9NXW9_C159 | ALKBH4 Probable alpha-ketoglutarate- | 5996 |
| | dependent dioxygenase | |
| Q5BKX5_C271 | C19orf54 UPF0692 protein C19orf54 | 5997 |
| Q92888_C752 | ARHGEF1 Rho guanine nucleotide | 5998 |
| | exchange factor 1 | |
| Q96EV8_C302 | DTNBP1 Dysbindin | 5999 |
| A6NC98_C1382 | CCDC88B Coiled-coil domain- | 6000 |
| | containing protein 88B | |
| Q9UQR0_C324 | SCML2 Sex comb on midleg-like | 6001 |
| | protein 2 | |
| P04083_C263 | ANXA1 Annexin A1 | 6002 |
| Q3V6T2_C1729 | CCDC88A Girdin | 6003 |
| Q12906_C278 | ILF3 Interleukin enhancer-binding | 6004 |
| | factor 3 | |
| Q14315_C2555 | FLNC Filamin-C | 6005 |
| Q14315_C2660 | FLNC Filamin-C | 6006 |
| O43813_C108 | LANCL1 LanC-like protein 1 | 6007 |
| Q8IY67_C297 | RAVER1 Ribonucleoprotein PTB- | 6008 |
| | binding 1 | |
| O43818_C416 | RRP9 U3 small nucleolar RNA- | 6009 |
| | interacting protein 2 | |
| Q9UI43_C126 | FTSJ2 Putative ribosomal RNA | 6010 |
| | methyltransferase 2 | |
| P04150_C287 | NR3C1 Glucocorticoid receptor | 6011 |
| Q96JH7_C897 | VCPIP1 Deubiquitinating protein | 6012 |
| | VCIP135 | |
| Q9UJA5_C243 | TRMT6 tRNA (adenine(58)-N(1))- | 6013 |
| | methyltransferase non-catalytic subunit | |
| | TRM6 | |
| Q9UJA5_C492 | TRMT6 tRNA (adenine(58)-N(1))- | 6014 |
| | methyltransferase non-catalytic subunit | |
| | TRM6 | |
| Q6PJG6_C820 | BRAT1 BRCA1-associated ATM | 6015 |
| | activator 1 | |
| Q7LBC6_C509 | KDM3B Lysine-specific demethylase | 6016 |
| | 3B | |
| P62140_C104 | PPP1CB Serine/threonine-protein | 6017 |
| | phosphatase PP1-beta catalytic subunit | |
| | beta | |
| P62140_C244 | PPP1CB Serine/threonine-protein | 6018 |
| | phosphatase PP1-beta catalytic subunit | |
| | beta | |
| Q5JPH6_C314 | EARS2 Probable glutamate--tRNA | 6019 |
| | ligase, mitochondrial | |
| P12429_C246 | ANXA3 Annexin A3 | 6020 |
| Q5D0E6_C468 | DALRD3 DALR anticodon-binding | 6021 |
| | domain-containing protein 3 | |
| Q13315_C2991 | ATM Serine-protein kinase ATM | 6022 |
| P51116_C109 | FXR2 Fragile X mental retardation | 6023 |
| | syndrome-related protein | |
| Q14683_C1210 | SMC1A Structural maintenance of | 6024 |
| | chromosomes protein 1A | |
| P11766_C268 | ADH5 Alcohol dehydrogenase class-3 | 6025 |
| P11766_C282 | ADH5 Alcohol dehydrogenase class-3 | 6026 |
| Q8NI08_C302 | NCOA7 Nuclear receptor coactivator 7 | 6027 |
| Q9HD64_C33 | XAGE1E G antigen family D member | 6028 |
| | 2 | |
| Q15796_C312 | SMAD2 Mothers against | 6029 |
| | decapentaplegic homolog 2 | |
| Q9UBC1_C304 | NFKBIL1 NF-kappa-B inhibitor-like | 6030 |
| | protein 1 | |
| Q9HB65_C15 | ELL3 RNA polymerase II elongation | 6031 |
| | factor ELL3 | |
| Q9HB65_C102 | ELL3 RNA polymerase II elongation | 6032 |
| | factor ELL3 | |
| Q9NUL3_C491 | STAU2 Double-stranded RNA-binding | 6033 |
| | protein Staufen homolo | |
| Q9BYI3_C300 | FAM126A Hyccin | 6034 |
| P51149_C143 | RAB7A Ras-related protein Rab-7a | 6035 |
| P09110_C26 | ACAA1 3-ketoacyl-CoA thiolase, | 6036 |
| | peroxisomal | |
| Q9UL15_C360 | BAG5 BAG family molecular | 6037 |
| | chaperone regulator 5 | |
| P55263_C160 | ADK Adenosine kinase | 6038 |
| Q9UL12_C799 | SARDH Sarcosine dehydrogenase, | 6039 |
| | mitochondrial | |
| O15061_C1225 | SYNM Synemin | 6040 |
| Q9NP64_C52 | ZCCHC17 Nucleolar protein of 40 kDa | 6041 |
| Q96S59_C527 | RANBP9 Ran-binding protein 9 | 6042 |
| O15382_C195 | BCAT2 Branched-chain-amino-acid | 6043 |
| | aminotransferase, mitochondrial | |
| O15382_C345 | BCAT2 Branched-chain-amino-acid | 6044 |
| | aminotransferase, mitoch | |
| P45974_C838 | USP5 Ubiquitin carboxyl-terminal | 6045 |
| | hydrolase 5 | |
| O14497_C1874 | ARID1A AT-rich interactive domain- | 6046 |
| | containing protein 1A | |
| O75521_C368 | ECI2 Enoyl-CoA delta isomerase 2, | 6047 |
| | mitochondrial | |
| Q92769_C111 | HDAC2 Histone deacetylase 2 | 6048 |
| Q96AE4_C148 | FUBP1 Far upstream element-binding | 6049 |
| | protein 1 | |
| Q8NFI3_C454 | ENGASE Cytosolic endo-beta-N- | 6050 |
| | acetylglucosaminidase | |
| Q9P107_C336 | GMIP GEM-interacting protein | 6051 |
| Q01469_C47 | FABP5 Fatty acid-binding protein, | 6052 |
| | epidermal | |
| Q6PCE3_C303 | PGM2L1 Glucose 1,6-bisphosphate | 6053 |
| | synthase | |
| Q9HAV0_C204 | GNB4 Guanine nucleotide-binding | 6054 |
| | protein subunit beta-4 | |
| Q9Y3C8_C69 | UFC1 Ubiquitin-fold modifier- | 6055 |
| | conjugating enzyme 1 | |
| Q8N806_C374 | UBR7 Putative E3 ubiquitin-protein | 6056 |
| | ligase UBR7 | |
| O43172_C299 | PRPF4 U4/U6 small nuclear | 6057 |
| | ribonucleoprotein Prp4 | |
| O94851_C552 | MICAL2 Protein-methionine sulfoxide | 6058 |
| | oxidase MICAL2 | |
| O60716_C692 | CTNND1 Catenin delta-1 | 6059 |
| O94855_C1022 | SEC24D Protein transport protein | 6060 |
| | Sec24D | |
| Q9BQS8_C1062 | FYCO1 FYVE and coiled-coil domain- | 6061 |
| | containing protein 1 | |
| Q9BSC4_C16 | NOL10 Nucleolar protein 10 | 6062 |
| Q9H5X1_C90 | FAM96A MIP18 family protein | 6063 |
| | FAM96A | |
| Q13325_C429 | IFIT5 Interferon-induced protein with | 6064 |
| | tetratricopeptide | |
| Q13325_C476 | IFIT5 Interferon-induced protein with | 6065 |
| | tetratricopeptide | |
| P23526_C228 | AHCY Adenosylhomocysteinase | 6066 |
| Q9UG63_C586 | ABCF2 ATP-binding cassette sub- | 6067 |
| | family F member 2 | |
| Q9BQA1_C26 | WDR77 Methylosome protein 50 | 6068 |
| Q9BQA1_C172 | WDR77 Methylosome protein 50 | 6069 |
| Q9BQA1_C208 | WDR77 Methylosome protein 50 | 6070 |
| Q9UKJ3_C569 | GPATCH8 G patch domain-containing | 6071 |
| | protein 8 | |
| Q15654_C47 | TRIP6 Thyroid receptor-interacting | 6072 |
| | protein 6 | |
| P36873_C202 | PPP1CC Serine/threonine-protein | 6073 |
| | phosphatase PP1-gamma cat | |
| Q8WXF1_C216 | PSPC1 Paraspeckle component 1 | 6074 |
| Q13555_C273 | CAMK2G Calcium/calmodulin- | 6075 |
| | dependent protein kinase type I | |
| P55265_C622 | ADAR Double-stranded RNA-specific | 6076 |
| | adenosine deaminase | |
| P60900_C115 | PSMA6 Proteasome subunit alpha type- | 6077 |
| | 6 | |
| P50336_C183 | PPOX Protoporphyrinogen oxidase | 6078 |
| Q63ZY3_C88 | KANK2 KN motif and ankyrin repeat | 6079 |
| | domain-containing prot | |
| Q9HB71_C173 | CACYBP Calcyclin-binding protein | 6080 |
| Q9P2T1_C224 | GMPR2 GMP reductase 2 | 6081 |
| Q5VIR6_C365 | VPS53 Vacuolar protein sorting- | 6082 |
| | associated protein 53 homolog | |
| P51003_C677 | PAPOLA Poly(A) polymerase alpha | 6083 |
| Q9NVE5_C50 | USP40 Ubiquitin carboxyl-terminal | 6084 |
| | hydrolase 40 | |
| | R.NQGGTC*YLNSLLQTLHFTPEFR.E | |
| Q9Y2Z2_C315 | MTO1 Protein MTO1 homolog, | 6085 |
| | mitochondrial | |
| P30042_C52 | C21orf33 ES1 protein homolog, | 6086 |
| | mitochondrial | |
| Q96CX6_C170 | LRRC58 Leucine-rich repeat- | 6087 |
| | containing protein 58 | |
| Q96CX2_C50 | KCTD12 BTB/POZ domain-containing | 6088 |
| | protein KCTD12 | |
| P18887_C20 | XRCC1 DNA repair protein XRCC1 | 6089 |
| Q9C0C9_C1288 | UBE2O Ubiquitin-conjugating enzyme | 6090 |
| | E2 O | |
| O00762_C114 | UBE2C Ubiquitin-conjugating enzyme | 6091 |
| | E2 C | |
| Q9Y520_C481 | PRRC2C Protein PRRC2C | 6092 |
| Q9Y520_C953 | PRRC2C Protein PRRC2C | 6093 |
| O75828_C227 | CBR3 Carbonyl reductase | 6094 |
| O75534_C42 | CSDE1 Cold shock domain-containing | 6095 |
| | protein E1 | |
| P09651_C175 | HNRNPA1 Heterogeneous nuclear | 6096 |
| | ribonucleoprotein A1 | |
| Q9H7T3_C143 | C10orf95 Uncharacterized protein | 6097 |
| | C10orf95 | |
| Q96R06_C382 | SPAG5 Sperm-associated antigen 5 | 6098 |
| O43837_C185 | IDH3B Isocitrate dehydrogenase | 6099 |
| Q96AD5_C312 | PNPLA2 Patatin-like phospholipase | 6100 |
| | domain-containing prote | |
| Q96BD8_C142 | SKA1 Spindle and kinetochore- | 6101 |
| | associated protein 1 | |
| Q8NFH4_C311 | NUP37 Nucleoporin Nup37 | 6102 |
| Q9NRA8_C767 | EIF4ENIF1 Eukaryotic translation | 6103 |
| | initiation factor 4E transp | |
| Q9NTM9_C248 | CUTC Copper homeostasis protein | 6104 |
| | cutC homolog | |
| Q8TEU7_C1491 | RAPGEF6 Rap guanine nucleotide | 6105 |
| | exchange factor 6 | |
| Q14207_C842 | NPAT Protein NPAT | 6106 |
| Q14204_C1932 | DYNC1H1 Cytoplasmic dynein 1 | 6107 |
| | heavy chain 1 | |
| Q14204_C4510 | DYNC1H1 Cytoplasmic dynein 1 | 6108 |
| | heavy chain 1 | |
| O60684_C273 | KPNA6 Importin subunit alpha-7 | 6109 |
| Q92841_C447 | DDX17 Probable ATP-dependent RNA | 6110 |
| | helicase DDX17 | |
| P07814_C1497 | EPRS Bifunctional glutamate/proline-- | 6111 |
| | tRNA ligase | |
| P19174_C247 | PLCG1 1-phosphatidylinositol 4,5- | 6112 |
| | bisphosphate phosphodie | |
| P19174_C646 | PLCG1 1-phosphatidylinositol 4,5- | 6113 |
| | bisphosphate phosphodie | |
| P22102_C466 | GART Trifunctional purine | 6114 |
| | biosynthetic protein adenosin | |
| O75643_C238 | SNRNP200 U5 small nuclear | 6115 |
| | ribonucleoprotein 200 kDa helicas | |
| O75643_C576 | SNRNP200 U5 small nuclear | 6116 |
| | ribonucleoprotein 200 kDa helicas | |
| Q04759_C17 | PRKCQ Protein kinase C theta type | 6117 |
| O94992_C122 | HEXIM1 Protein HEXIM1 | 6118 |
| P61106_C26 | RAB14 Ras-related protein Rab-14 | 6119 |
| P50851_C982 | LRBA Lipopolysaccharide-responsive | 6120 |
| | and beige-like ancho | |
| P50851_C1228 | LRBA Lipopolysaccharide-responsive | 6121 |
| | and beige-like ancho | |
| Q6FI81_C237 | CIAPIN1 Anamorsin | 6122 |
| Q6FI81_C274 | CIAPIN1 Anamorsin | 6123 |
| Q6FI81_C285 | CIAPIN1 Anamorsin | 6124 |
| Q96RL1_C283 | UIMC1 BRCA1-A complex subunit | 6125 |
| | RAP80 | |
| O60264_C165 | SMARCA5 SWI/SNF-related matrix- | 6126 |
| | associated actin-dependent | |
| P11586_C152 | MTHFD1 C-1-tetrahydrofolate | 6127 |
| | synthase, cytoplasmic | |
| Q86Y56_C138 | HEATR2 HEAT repeat-containing | 6128 |
| | protein 2 | |
| Q15648_C681 | MED1 Mediator of RNA polymerase II | 6129 |
| | transcription subunit | |
| Q6P4I2_C106 | WDR73 WD repeat-containing protein | 6130 |
| | 73 | |
| P62318_C20 | SNRPD3 Small nuclear | 6131 |
| | ribonucleoprotein Sm D3 | |
| Q53HC9_C198 | TSSC1 Protein TSSC1 | 6132 |
| Q9BRF8_C143 | CPPED1 Calcineurin-like | 6133 |
| | phosphoesterase domain-containing | |
| O95630_C221 | STAMBP STAM-binding protein | 6134 |
| P30101_C92 | PDIA3 Protein disulfide-isomerase A3 | 6135 |
| P48200_C201 | IREB2 Iron-responsive element-binding | 6136 |
| | protein 2 | |
| O14730_C22 | RIOK3 Serine/threonine-protein kinase | 6137 |
| | RIO3 | |
| P09884_C306 | POLA1 DNA polymerase alpha | 6138 |
| | catalytic subunit | |
| P09884_C1224 | POLA1 DNA polymerase alpha | 6139 |
| | catalytic subunit | |
| P12034_C202 | FGF5 Fibroblast growth factor 5 | 6140 |
| P10768_C243 | ESD S-formylglutathione hydrolase | 6141 |
| Q7L2E3_C1183 | DHX30 Putative ATP-dependent RNA | 6142 |
| | helicase DHX30 | |
| Q9UJM3_C113 | ERRFI1 ERBB receptor feedback | 6143 |
| | inhibitor 1 | |
| Q9UJM3_C204 | ERRFI1 ERBB receptor feedback | 6144 |
| | inhibitor 1 | |
| Q8WTW3_C318 | COG1 Conserved oligomeric Golgi | 6145 |
| | complex subunit 1 | |
| Q96KP1_C638 | EXOC2 Exocyst complex component 2 | 6146 |
| P62136_C245 | PPP1CA Serine/threonine-protein | 6147 |
| | phosphatase PP1-alpha cat | |
| Q9NQR4_C44 | NIT2 Omega-amidase NIT2 | 6148 |
| P52948_C1711 | NUP98 Nuclear pore complex protein | 6149 |
| | Nup98-Nup96 | |
| O15014_C178 | ZNF609 Zinc finger protein 609 | 6150 |
| P13674_C167 | P4HA1 Prolyl 4-hydroxylase subunit | 6151 |
| | alpha-1 | |
| O95232_C43 | LUC7L3 Luc7-like protein 3 | 6152 |
| Q96JM3_C119 | CHAMP1 Chromosome alignment- | 6153 |
| | maintaining phosphoprotein 1 | |
| Q12857_C404 | NFIA Nuclear factor 1 A-type | 6154 |
| O75818_C49 | RPP40 Ribonuclease P protein subunit | 6155 |
| | p40 | |
| Q8WYJ6_C102 | SEPT1 Septin-1 | 6156 |
| O75815_C360 | BCAR3 Breast cancer anti-estrogen | 6157 |
| | resistance protein 3 | |
| Q08J23_C235 | NSUN2 tRNA (cytosine(34)-C(5))- | 6158 |
| | methyltransferase | |
| Q08J23_C758 | NSUN2 tRNA (cytosine(34)-C(5))- | 6159 |
| | methyltransferase | |
| Q9H2U1_C135 | DHX36 Probable ATP-dependent RNA | 6160 |
| | helicase DHX36 | |
| Q86VQ1_C51 | GLCCI1 Glucocorticoid-induced | 6161 |
| | transcript 1 protein | |
| Q04695_C336 | KRT17 Keratin, type I cytoskeletal 17 | 6162 |
| Q9Y530_C33 | C6orf130 O-acetyl-ADP-ribose | 6163 |
| | deacetylase C6orf130 | |
| Q9Y530_C122 | C6orf130 O-acetyl-ADP-ribose | 6164 |
| | deacetylase C6orf130 | |
| O43929_C16 | ORC4 Origin recognition complex | 6165 |
| | subunit 4 | |
| Q66K14_C289 | TBC1D9B TBC1 domain family | 6166 |
| | member 9B | |
| Q8N0W3_C484 | FUK L-fucose kinase | 6167 |
| Q8N0W3_C582 | FUK L-fucose kinase | 6168 |
| P61812_C309 | TGFB2 Transforming growth factor | 6169 |
| | beta-2 | |
| Q86X10_C923 | RALGAPB Ral GTPase-activating | 6170 |
| | protein subunit beta | |
| O95833_C219 | CLIC3 Chloride intracellular channel | 6171 |
| | protein 3 | |
| J3KR12_C95 | Uncharacterized protein | 6172 |
| P12931_C280 | SRC Proto-oncogene tyrosine-protein | 6173 |
| | kinase Src | |
| Q13535_C2336 | ATR Serine/threonine-protein kinase | 6174 |
| | ATR | |
| Q6PIW4_C200 | FIGNL1 Fidgetin-like protein 1 | 6175 |
| Q6PIW4_C672 | FIGNL1 Fidgetin-like protein 1 | 6176 |
| P31939_C575 | ATIC Bifunctional purine biosynthesis | 6177 |
| | protein PURH | |
| Q15291_C212 | RBBP5 Retinoblastoma-binding protein | 6178 |
| | 5 | |
| O14618_C227 | CCS Copper chaperone for superoxide | 6179 |
| | dismutase | |
| Q9BPW8_C106 | NIPSNAP1 Protein NipSnap homolog 1 | 6180 |
| Q9BPW8_C138 | NIPSNAP1 Protein NipSnap homolog 1 | 6181 |
| Q8IUC6_C192 | TICAM1 TIR domain-containing | 6182 |
| | adapter molecule 1 | |
| Q9P0V3_C787 | SH3BP4 SH3 domain-binding protein 4 | 6183 |
| P52888_C18 | THOP1 Thimet oligopeptidase | 6184 |
| Q9H6T3_C519 | RPAP3 RNA polymerase II-associated | 6185 |
| | protein 3 | |
| Q07157_C1727 | TJP1 Tight junction protein ZO-1 | 6186 |
| Q15061_C380 | WDR43 WD repeat-containing protein | 6187 |
| | 43 | |
| Q15067_C449 | ACOX1 Peroxisomal acyl-coenzyme A | 6188 |
| | oxidase 1 | |
| Q6P1X5_C1093 | TAF2 Transcription initiation factor | 6189 |
| | TFIID subunit 2 | |
| P67936_C154 | TPM4 Tropomyosin alpha-4 chain | 6190 |
| Q92918_C484 | MAP4K1 Mitogen-activated protein | 6191 |
| | kinase kinase kinase kin | |
| O15226_C37 | NKRF NF-kappa-B-repressing factor | 6192 |
| Q9P2J5_C527 | LARS Leucine--tRNA ligase, | 6193 |
| | cytoplasmic | |
| Q96GY3_C28 | LIN37 Protein lin-37 homolog | 6194 |
| Q96GY3_C176 | LIN37 Protein lin-37 homolog | 6195 |
| Q8TF72_C1104 | SHROOM3 Protein Shroom3 | 6196 |
| Q8TF72_C1367 | SHROOM3 Protein Shroom3 | 6197 |
| P62906_C164 | RPL10A 60S ribosomal protein L10a | 6198 |
| Q86VP6_C356 | CAND1 Cullin-associated NEDD8- | 6199 |
| | dissociated protein 1 | |
| Q92597_C49 | NDRG1 Protein NDRG1 | 6200 |
| P35237_C370 | SERPINB6 Serpin B6 | 6201 |
| P30876_C177 | POLR2B DNA-directed RNA | 6202 |
| | polymerase II subunit RPB2 | |
| P30876_C622 | POLR2B DNA-directed RNA | 6203 |
| | polymerase II subunit RPB2 | |
| P14324_C62 | FDPS Farnesyl pyrophosphate synthase | 6204 |
| Q9Y3F4_C152 | STRAP Serine-threonine kinase | 6205 |
| | receptor-associated protei | |
| P27144_C22 | AK4 Adenylate kinase isoenzyme 4, | 6206 |
| | mitochondrial | |
| Q14135_C167 | VGLL4 Transcription cofactor | 6207 |
| | vestigial-like protein 4 | |
| Q14135_C205 | VGLL4 Transcription cofactor | 6208 |
| | vestigial-like protein 4 | |
| O43143_C750 | DHX15 Putative pre-mRNA-splicing | 6209 |
| | factor ATP-dependent RN | |
| Q8IW35_C599 | CEP97 Centrosomal protein of 97 kDa | 6210 |
| P67775_C165 | PPP2CA Serine/threonine-protein | 6211 |
| | phosphatase 2A catalytic | |
| P67775_C196 | PPP2CA Serine/threonine-protein | 6212 |
| | phosphatase 2A catalytic | |
| Q92667_C64 | AKAP1 A-kinase anchor protein 1, | 6213 |
| | mitochondrial | |
| Q32MZ4_C726 | LKRFIP1 Leucine-rich repeat | 6214 |
| | flightless-interacting protein | |
| Q32MZ4_C750 | LRRFIP1 Leucine-rich repeat | 6215 |
| | flightless-interacting protein | |
| Q99615_C58 | DNAJC7 DnaJ homolog subfamily C | 6216 |
| | member 7 | |
| Q99615_C175 | DNAJC7 DnaJ homolog subfamily C | 6217 |
| | member 7 | |
| Q99615_C225 | DNAJC7 DnaJ homolog subfamily C | 6218 |
| | member 7 | |
| Q05086_C198 | UBE3A Ubiquitin-protein ligase E3A | 6219 |
| Q52LW3_C1215 | ARHGAP29 Rho GTPase-activating | 6220 |
| | protein 29 | |
| Q52LW3_C1239 | ARHGAP29 Rho GTPase-activating | 6221 |
| | protein 29 | |
| Q9UNS1_C700 | TIMELESS Protein timeless homolog | 6222 |
| O94885_C1120 | SASH1 SAM and SH3 domain- | 6223 |
| | containing protein 1 | |
| P10619_C281 | CTSA Lysosomal protective protein | 6224 |
| Q9UHQ1_C192 | NARF Nuclear prelamin A recognition | 6225 |
| | fector | |
| Q9P2N6_C459 | KANSL3 KAT8 regulatory NSL | 6226 |
| | complex subunit 3 | |
| Q9ULC5_C322 | ACSL5 Long-chain-fatty-acid--CoA | 6227 |
| | ligase 5 | |
| O75116_C428 | ROCK2 Rho-associated protein kinase | 6228 |
| | 2 | |
| P62330_C90 | ARF6 ADP-ribosylation factor 6 | 6229 |
| Q96G74_C434 | OTUD5 OTU domain-containing | 6230 |
| | protein 5 | |
| Q13444_C667 | ADAM15 Disintegrin and | 6231 |
| | metalloproteinase domain-containin | |
| Q5UIP0_C1904 | RIF1 Telomere-associated protein RIF1 | 6232 |
| Q9NZB2_C919 | FAM120A Constitutive coactivator of | 6233 |
| | PPAR-gamma-like protei | |
| O94805_C32 | ACTL6B Actin-like protein 6B | 6234 |
| Q9UDY8_C71 | MALT1 Mucosa-associated lymphoid | 6235 |
| | tissue lymphoma translo | |
| P06400_C590 | RB1 Retinoblastoma-associated protein | 6236 |
| P55199_C433 | ELL RNA polymerase II elongation | 6237 |
| | factor ELL | |
| P55199_C494 | ELL RNA polymerase II elongation | 6238 |
| | factor ELL | |
| Q96KR1_C525 | ZFR Zinc finger RNA-binding protein | 6239 |
| Q9H0K6_C640 | PUS7L Pseudouridylate synthase 7 | 6240 |
| | homolog-like protein | |
| Q96K76_C856 | USP47 Ubiquitin carboxyl-terminal | 6241 |
| | hydrolase 47 | |
| O14727_C115 | APAF1 Apoptotic protease-activating | 6242 |
| | factor 1 | |
| Q96N21_C52 | ENTHD2 AP-4 complex accessory | 6243 |
| | subunit tepsin | |
| Q9HC38_C171 | GLOD4 Glyoxalase domain-containing | 6244 |
| | protein 4 | |
| Q9HC38_C221 | GLOD4 Glyoxalase domain-containing | 6245 |
| | protein 4 | |
| Q9NSD9_C76 | FARSB Phenylalanine--tRNA ligase | 6246 |
| | beta subunit | |
| O75376_C1274 | NCOR1 Nuclear receptor corepressor 1 | 6247 |
| O75376_C2322 | NCOR1 Nuclear receptor corepressor 1 | 6248 |
| Q15058_C291 | KIF14 Kinesin-like protein KIF14 | 6249 |
| Q15050_C52 | RRS1 Ribosome biogenesis regulatory | 6250 |
| | protein homolog | |
| Q15052_C667 | ARHGEF6 Rho guanine nucleotide | 6251 |
| | exchange factor 6 | |
| O00592_C344 | PODXL Podocalyxin | 6252 |
| P49903_C317 | SEPHS1 Selenide, water dikinase 1 | 6253 |
| E7EVH7_C562 | KLC1 Kinesin light chain 1 | 6254 |
| Q9Y6A5_C242 | TACC3 Transforming acidic coiled- | 6255 |
| | coil-containing protein | |
| Q6P1K8_C299 | GTF2H2D General transcription factor | 6256 |
| | IIH subunit 2-like pr | |
| Q3B7T1_C589 | EDRF1 Erythroid differentiation- | 6257 |
| | related factor 1 | |
| Q9H0W8_C411 | SMG9 Protein SMG9 | 6258 |
| Q86XP3_C281 | DDX42 ATP-dependent RNA helicase | 6259 |
| | DDX42 | |
| Q08257_C45 | CRYZ Quinone oxidoreductase | 6260 |
| O75879_C170 | PET112 Glutamyl-tRNA(Gln) | 6261 |
| | amidotransferase subunit B, | |
| | mitochondrial | |
| Q92696_C354 | RABGGTA Geranylgeranyl transferase | 6262 |
| | type-2 subunit alpha | |
| Q15772_C1052 | SPEG Striated muscle preferentially | 6263 |
| | expressed protein k | |
| O75616_C348 | ERAL1 GTPase Era, mitochondrial | 6264 |
| Q6UB35_C291 | MTHFD1L Monofunctional C1- | 6265 |
| | tetrahydrofolate synthase, | |
| | mitochondrial | |
| Q8N392_C323 | ARHGAP18 Rho GTPase-activating | 6266 |
| | protein 18 | |
| Q9UHR6_C188 | ZNHIT2 Zinc finger HIT domain- | 6267 |
| | containing protein 2 | |
| P57081_C95 | WDR4 tRNA (guanine-N(7)-)- | 6268 |
| | methyltransferase subunit WDR | |
| Q9H4L4_C274 | SENP3 Sentrin-specific protease 3 | 6269 |
| Q14149_C632 | MORC3 MORC family CW-type zinc | 6270 |
| | finger protein 3 | |
| O95455_C175 | TGDS dTDP-D-glucose 4,6- | 6271 |
| | dehydratase | |
| O95453_C169 | PARN Poly(A)-specific ribonuclease | 6272 |
| | PARN | |
| Q99426_C216 | TBCB Tubulin-folding cofactor B | 6273 |
| Q16566_C202 | CAMK4 Calcium/calmodulin- | 6274 |
| | dependent protein kinase type I | |
| Q9Y5P6_C113 | GMPPB Mannose-1-phosphate | 6275 |
| | guanyltransferase beta | |
| Q9UBT2_C158 | UBA2 SUMO-activating enzyme | 6276 |
| | subunit 2 | |
| Q96C36_C225 | PYCR2 Pyrroline-5-carboxylate | 6277 |
| | reductase 2 | |
| Q6NS38_C192 | ALKBH2 Alpha-ketoglutarate- | 6278 |
| | dependent dioxygenase alkB homolog 2 | |
| Q86SQ0_C385 | PHLDB2 Pleckstrin homology-like | 6279 |
| | domain family B member 2 | |
| Q6DKI1_C184 | RPL7L1 60S ribosomal protein L7-like | 6280 |
| | 1 | |
| Q06203_C503 | PPAT Amidophosphoribosyltransferase | 6281 |
| Q7Z6I6_C965 | ARHGAP30 Rho GTPase-activating | 6282 |
| | protein 30 | |
| Q9ULP9_C223 | TBC1D24 TBC1 domain family | 6283 |
| | member 24 | |
| P34897_C343 | SHMT2 Serine | 6284 |
| | hydroxymethyltransferase, | |
| | mitochondrial | |
| P49736_C315 | MCM2 DNA replication licensing | 6285 |
| | factor MCM2 | |
| O95071_C2094 | UBR5 E3 ubiquitin-protein ligase | 6286 |
| | UBR5 | |
| O95071_C2173 | UBR5 E3 ubiquitin-protein ligase | 6287 |
| | UBR5 | |
| Q96L91_C162 | EP400 E1A-binding protein p400 | 6288 |
| Q6XZF7_C1434 | DNMBP Dynamin-binding protein | 6289 |
| P34949_C11 | MPI Mannose-6-phosphate isomerase | 6290 |
| Q15437_C180 | SEC23B Protein transport protein | 6291 |
| | Sec23B | |
| P09960_C543 | LTA4H Leukotriene A-4 hydrolase | 6292 |
| P30460_C349 | HLA-B HLA class I histocompatibility | 6293 |
| | antigen, B-8 alpha | |
| Q9BVS4_C449 | RIOK2 Serine/threonine-protein kinase | 6294 |
| | RIO2 | |
| O15027_C1273 | SEC16A Protein transport protein | 6295 |
| | Sec16A | |
| O15027_C1619 | SEC16A Protein transport protein | 6296 |
| | Sec16A | |
| Q9NQW7_C279 | XPNPEP1 Xaa-Pro aminopeptidase 1 | 6297 |
| Q96EB6_C380 | SIRT1 NAD-dependent protein | 6298 |
| | deacetylase sirtuin-1 | |
| P10398_C514 | ARAF Serine/threonine-protein kinase | 6299 |
| | A-Raf | |
| Q15046_C456 | KARS Lysine--tRNA ligase | 6300 |
| Q15046_C534 | KARS Lysine--tRNA ligase | 6301 |
| Q12802_C1548 | AKAP13 A-kinase anchor protein 13 | 6302 |
| Q12802_C2101 | AKAP13 A-kinase anchor protein 13 | 6303 |
| Q9H7B4_C421 | SMYD3 SET and MYND domain- | 6304 |
| | containing protein 3 | |
| Q13867_C40 | BLMH Bleomycin hydrolase | 6305 |
| Q13867_C189 | BLMH Bleomycin hydrolase | 6306 |
| Q13404_C71 | UBE2V1 Ubiquitin-conjugating | 6307 |
| | enzyme E2 variant 1 | |
| Q9BVA0_C344 | KATNB1 Katanin p80 WD40- | 6308 |
| | containing subunit B1 | |
| O60504_C521 | SORBS3 Vinexin | 6309 |
| P07437_C127 | TUBB Tubulin beta chain | 6310 |
| Q96SW2_C287 | CRBN Protein cereblon | 6311 |
| Q9Y490_C1023 | TLN1 Talin-1 | 6312 |
| Q9Y490_C2161 | TLN1 Talin-1 | 6313 |
| Q86W56_C963 | PARG Poly(ADP-ribose) | 6314 |
| | glycohydrolase | |
| P49005_C83 | POLD2 DNA polymerase delta subunit | 6315 |
| | 2 | |
| P49005_C404 | POLD2 DNA polymerase delta subunit | 6316 |
| | 2 | |
| P49006_C134 | MARCKSL1 MARCKS-related protein | 6317 |
| Q05932_C209 | FPGS Folylpolyglutamate synthase, | 6318 |
| | mitochondrial | |
| Q9Y3D6_C41 | FIS1 Mitochondrial fission 1 protein | 6319 |
| O94916_C270 | NFAT5 Nuclear factor of activated T- | 6320 |
| | cells 5 | |
| P27708_C1374 | CAD CAD protein | 6321 |
| Q96LB3_C53 | IFT74 Intraflagellar transport protein 74 | 6322 |
| | homolog | |
| Q96EY9_C13 | ADAT3 tRNA-specific adenosine | 6323 |
| | deaminase-like protein 3 | |
| O75608_C211 | LYPLA1 Acyl-protein thioesterase 1 | 6324 |
| P22033_C433 | MUT Methylmalonyl-CoA mutase, | 6325 |
| | mitochondrial | |
| O43290_C560 | SART1 U4/U6.U5 tri-snRNP- | 6326 |
| | associated protein 1 | |
| O43617_C31 | TRAPPC3 Trafficking protein particle | 6327 |
| | complex subunit 3 | |
| Q9P258_C337 | RCC2 Protein RCC2 | 6328 |
| P61313_C110 | RPL15 60S ribosomal protein L15 | 6329 |
| O95684_C244 | FGFR1OP FGFR1 oncogene partner | 6330 |
| Q17RN3_C36 | FAM98C Protein FAM98C | 6331 |
| P11498_C372 | PC Pyruvate carboxylase, | 6332 |
| | mitochondrial | |
| Q13263_C152 | TRIM28 Transcription intermediary | 6333 |
| | factor 1-beta | |
| Q13263_C717 | TRIM28 Transcription intermediary | 6334 |
| | factor 1-beta | |
| O75131_C385 | CPNE3 Copine-3 | 6335 |
| Q16762_C64 | TST Thiosulfate sulfurtransferase | 6336 |
| Q02790_C103 | FKBP4 Peptidyl-prolyl cis-trans | 6337 |
| | isomerase FKBP4 | |
| Q02790_C342 | FKBP4 Peptidyl-prolyl cis-trans | 6338 |
| | isomerase FKBP4 | |
| P26358_C41 | DNMT1 DNA (cytosine-5)- | 6339 |
| | methyltransferase 1 | |
| P26358_C580 | DNMT1 DNA (cytosine-5)- | 6340 |
| | methyltransferase 1 | |
| Q8TEM1_C767 | NUP210 Nuclear pore membrane | 6341 |
| | glycoprotein 210 | |
| P61006_C23 | RAB8A Ras-related protein Rab-8A | 6342 |
| O15446_C55 | CD3EAP DNA-directed RNA | 6343 |
| | polymerase I subunit RPA34 | |
| P54136_C115 | RARS Arginine--tRNA ligase, | 6344 |
| | cytoplasmic | |
| P36551_C319 | CPOX Coproporphyrinogen-III | 6345 |
| | oxidase, mitochondrial | |
| Q86YV5_C155 | SGK223 Tyrosine-protein kinase | 6346 |
| | SgK223 | |
| Q86YV5_C221 | SGK223 Tyrosine-protein kinase | 6347 |
| | SgK223 | |
| Q96PV6_C529 | LENG8 Leukocyte receptor cluster | 6348 |
| | member 8 | |
| P30520_C182 | ADSS Adenylosuccinate synthetase | 6349 |
| | isozyme 2 | |
| Q9NV88_C578 | INTS9 Integrator complex subunit 9 | 6350 |
| P49589_C182 | CARS Cysteine--tRNA ligase, | 6351 |
| | cytoplasmic | |
| P15374_C50 | UCHL3 Ubiquitin carboxyl-terminal | 6352 |
| | hydrolase isozyme L3 | |
| P55735_C299 | SEC13 Protein SEC13 homolog | 6353 |
| Q9NR09_C1547 | BIRC6 Baculoviral IAP repeat- | 6354 |
| | containing protein 6 | |
| A8MVX7_C100 | Uncharacterized protein | 6355 |
| P56192_C333 | MARS Methionine--tRNA ligase, | 6356 |
| | cytoplasmic | |
| Q8NAG6_C517 | ANKLE1 Ankyrin repeat and LEM | 6357 |
| | domain-containing protein 1 | |
| P55884_C302 | EIF3B Eukaryotic translation initiation | 6358 |
| | factor 3 subunit | |
| Q86V15_C35 | CASZ1 Zinc finger protein castor | 6359 |
| | homolog 1 | |
| Q9H2G2_C1153 | SLK STE20-like serine/threonine- | 6360 |
| | protein kinase | |
| Q99570_C899 | PIK3R4 Phosphoinositide 3-kinase | 6361 |
| | regulatory subunit 4 | |
| Q9BVP2_C251 | GNL3 Guanine nucleotide-binding | 6362 |
| | protein-like 3 | |
| Q13813_C1454 | SPTAN1 Spectrin alpha chain, non- | 6363 |
| | erythrocytic 1 | |
| Q6P3S1_C21 | DENND1B DENN domain-containing | 6364 |
| | protein 1B | |
| P07737_C71 | PFN1 Profilin-1 | 6365 |
| O00425_C546 | IGF2BP3 Insulin-like growth factor 2 | 6366 |
| | mRNA-binding protein | |
| Q9H832_C154 | UBE2Z Ubiquitin-conjugating enzyme | 6367 |
| | E2 Z | |
| Q9H832_C261 | UBE2Z Ubiquitin-conjugating enzyme | 6368 |
| | E2 Z | |
| Q9UKV8_C188 | EIF2C2 Protein argonaute-2 | 6369 |
| Q00796_C350 | SORD Sorbitol dehydrogenase | 6370 |
| Q9Y376_C121 | CAB39 Calcium-binding protein 39 | 6371 |
| P00492_C66 | HPRT1 Hypoxanthine-guanine | 6372 |
| | phosphoribosyltransferase | |
| Q9NVR5_C727 | DNAAF2 Protein kintoun | 6373 |
| P15498_C652 | VAV1 Proto-oncogene vav | 6374 |
| Q92499_C668 | DDX1 ATP-dependent RNA helicase | 6375 |
| | DDX1 | |
| P08559_C261 | PDHA1 Pyruvate dehydrogenase E1 | 6376 |
| | component subunit alpha, | |
| Q8IUY3_C274 | GRAMD2 GRAM domain-containing | 6377 |
| | protein 2 | |
| Q96PE3_C854 | INPP4A Type I inositol 3,4- | 6378 |
| | bisphosphate 4-phosphatase | |
| Q9NPD8_C86 | UBE2T Ubiquitin-conjugating enzyme | 6379 |
| | E2 T | |
| Q9H307_C439 | PNN Pinin | 6380 |
| P46939_C2003 | UTRN Utrophin | 6381 |
| P46939_C2098 | UTRN Utrophin | 6382 |
| P46939_C3076 | UTRN Utrophin | 6383 |
| Q04637_C934 | EIF4G1 Eukaryotic translation | 6384 |
| | initiation factor 4 gamma 1 | |
| D6RAD4_C204 | CDK7 Cyclin-dependent kinase 7 | 6385 |
| P52701_C579 | MSH6 DNA mismatch repair protein | 6386 |
| | Msh6 | |
| O60292_C1322 | SIPA1L3 Signal-induced proliferation- | 6387 |
| | associated 1-like protein | |
| Q16831_C17 | UPP1 Uridine phosphorylase 1 | 6388 |
| P49368_C372 | CCT3 T-complex protein 1 subunit | 6389 |
| | gamma | |
| O75962_C1717 | TRIO Triple functional domain protein | 6390 |
| O75962_C2327 | TRIO Triple functional domain protein | 6391 |
| Q53H82_C100 | LACTB2 Beta-lactamase-like protein 2 | 6392 |
| Q5TC12_C321 | ATPAF1 ATP synthase mitochondrial | 6393 |
| | F1 complex assembly factor 1 | |
| P33992_C221 | MCM5 DNA replication licensing | 6394 |
| | factor MCM5 | |
| P12081_C455 | HARS Histidine--tRNA ligase, | 6395 |
| | cytoplasmic | |
| Q15418_C432 | RPS6KA1 Ribosomal protein S6 kinase | 6396 |
| | alpha-1 | |
| P49590_C236 | HARS2 Probable histidine--tRNA | 6397 |
| | ligase, mitochondrial | |
| O14893_C63 | GEMIN2 Gem-associated protein 2 | 6398 |
| Q9H0D6_C557 | XRN2 5-3 exoribonuclease 2 | 6399 |
| Q4G0F5_C334 | VPS26B Vacuolar protein sorting- | 6400 |
| | associated protein 26B | |
| P08567_C59 | PLEK Pleckstrin | 6401 |
| P50135_C196 | HNMT Histamine N-methyltransferase | 6402 |
| Q9BXF6_C66 | RAB11FIP5 Rab11 family-interacting | 6403 |
| | protein 5 | |
| P51668_C111 | UBE2D1 Ubiquitin-conjugating | 6404 |
| | enzyme E2 D1 | |
| Q5T0L3_C212 | C1orf111 Uncharacterized protein | 6405 |
| | C1orf111 | |
| A6NHR9_C897 | SMCHD1 Structural maintenance of | 6406 |
| | chromosomes flexible hinge domain | |
| | containing 1 | |
| A6NHR9_C1899 | SMCHD1 Structural maintenance of | 6407 |
| | chromosomes flexible hinge domain | |
| | containing 1 | |
| Q12824_C167 | SMARCB1 SWI/SNF-related matrix- | 6408 |
| | associated actin-dependent | |
| Q969R8_C438 | ITFG2 Integrin-alpha FG-GAP repeat- | 6409 |
| | containing protein 2 | |
| P17544_C61 | ATF7 Cyclic AMP-dependent | 6410 |
| | transcription factor ATF-7 | |
| O00410_C1057 | IPO5 Importin-5 | 6411 |
| Q9BT25_C354 | HAUS8 HAUS augmin-like complex | 6412 |
| | subunit 8 | |
| O95861_C206 | BPNT1 3(2),5-bisphosphate | 6413 |
| | nucleotidase 1 | |
| O15260_C32 | SURF4 Surfeit locus protein 4 | 6414 |
| P35580_C1238 | MYH10 Myosin-10 | 6415 |
| P35270_C171 | SPR Sepiapterin reductase | 6416 |
| P42330_C193 | AKR1C3 Aldo-keto reductase family 1 | 6417 |
| | member C3 | |
| P42331_C302 | ARHGAP25 Rho GTPase-activating | 6418 |
| | protein 25 | |
| Q9Y230_C227 | RUVBL2 RuvB-like 2 | 6419 |
| Q92621_C877 | NUP205 Nuclear pore complex protein | 6420 |
| | Nup205 | |
| Q92621_C1297 | NUP205 Nuclear pore complex protein | 6421 |
| | Nup205 | |
| P42025_C222 | ACTR1B Beta-centractin | 6422 |
| Q5H9R7_C844 | PPP6R3 Serine/threonine-protein | 6423 |
| | phosphatase 6 regulatory | |
| Q02241_C447 | KIF23 Kinesin-like protein KIF23 | 6424 |
| O94915_C888 | FRYL Protein furry homolog-like | 6425 |
| P53621_C245 | COPA Coatomer subunit alpha | 6426 |
| P53621_C522 | COPA Coatomer subunit alpha | 6427 |
| O43678_C58 | NDUFA2 NADH dehydrogenase | 6428 |
| Q14116_C74 | IL18 Interleukin-18 | 6429 |
| Q86Y37_C362 | CACUL1 CDK2-associated and cullin | 6430 |
| | domain-containing protein | |
| Q99704_C115 | DOK1 Docking protein 1 | 6431 |
| O75153_C214 | KIAA0664 Clustered mitochondria | 6432 |
| | protein homolog | |
| Q99961_C147 | SH3GL1 Endophilin-A2 | 6433 |
| O43294_C416 | TGFB1I1 Transforming growth factor | 6434 |
| | beta-1-induced transcript 1 | |
| Q7Z7H8_C213 | MRPL10 39S ribosomal protein L10, | 6435 |
| | mitochondrial | |
| Q96IF1_C182 | AJUBA LIM domain-containing | 6436 |
| | protein ajuba | |
| Q8NC26_C51 | ZNF114 Zinc finger protein 114 | 6437 |
| Q8NC26_C136 | ZNF114 Zinc finger protein 114 | 6438 |
| P21266_C39 | GSTM3 Glutathione S-transferase Mu 3 | 6439 |
| Q8WXA9_C494 | SREK1 Splicing regulatory | 6440 |
| | glutamine/lysine-rich protein | |

[0550] Table 4 illustrates an exemplary list of cysteine-containing proteins identified in a human T cell. Table 4 further shows the accession number (or the protein identifier) of the protein, cysteine residue number, and an illustrative peptide fragment containing the cysteine of interest (denoted by C*).

TABLE 4

| | | SEQ |
|---|---|---|
| | | ID |
| Identifier | Protein Name | NO: |
| Q13418_C239 | ILK Integrin-linked protein kinase | 6441 |
| P07203_C156 | GPX1 Glutathione peroxidase 1 | 6442 |
| P00390_C102 | GSR Glutathione reductase, | 6443 |
| | mitochondrial | |
| P07203_C78 | GPX1 Glutathione peroxidase 1 | 6444 |
| Q9BRA2_C43 | TXNDC17 Thioredoxin domain- | 6445 |
| | containing protein 17 | |
| Q01844_C524 | EWSR1 RNA-binding protein EWS | 6446 |
| Q99798_C385 | ACO2 Aconitate hydratase, | 6447 |
| | mitochondrial | |
| P18031_C215 | PTPN1 Tyrosine-protein phosphatase | 6448 |
| | non-receptor type 1 | |
| Q9Y2R4_C536 | DDX52 Probable ATP-dependent RNA | 6449 |
| | helicase DDX52 | |
| P53621_C921 | COPA Coatomer subunit alpha | 6450 |
| P31930_C380 | UQCRC1 Cytochrome b-c1 complex | 6451 |
| | subunit 1, mitochondrial | |
| P09211_C48 | GSTP1 Glutathione S-transferase P | 6452 |
| P46459_C264 | NSF Vesicle-fusing ATPase | 6453 |
| Q9NR56_C43 | MBNL1 Muscleblind-like protein 1 | 6454 |
| Q5VZF2_C43 | MBNL2 Muscleblind-like protein 2 | 6455 |
| P49368_C455 | CCT3 T-complex protein 1 subunit | 6456 |
| | gamma | |
| P47756_C62 | CAPZB F-actin-capping protein | 6457 |
| | subunit beta | |
| P57737_C42 | CORO7 Coronin-7 | 6458 |
| Q9BV79_C263 | MECR Trans-2-enoyl-CoA reductase, | 6459 |
| | mitochondrial | |
| P13010_C339 | XRCC5 X-ray repair cross- | 6460 |
| | complementing protein 5 | |
| Q9H2U2_C302 | PPA2 Inorganic pyrophosphatase 2, | 6461 |
| | mitochondrial | |
| P13010_C346 | XRCC5 X-ray repair cross- | 6462 |
| | complementing protein 5 | |
| Q16875_C102 | PFKFB3 6-phosphofructo-2- | 6463 |
| | kinase/fructose-2,6-bisphosphata | |
| P14866_C452 | HNRNPL Heterogeneous nuclear | 6464 |
| | ribonucleoprotein L | |
| Q99798_C448 | ACO2 Aconitate hydratase, | 6465 |
| | mitochondrial | |
| Q99798_C451 | ACO2 Aconitate hydratase, | 6466 |
| | mitochondrial | |
| Q9C0B1_C326 | FTO Alpha-ketoglutarate-dependent | 6467 |
| | dioxygenase FTO | |
| Q92947_C115 | GCDH Glutaryl-CoA dehydrogenase, | 6468 |
| | mitochondrial | |
| Q92597_C168 | NDRG1 Protein NDRG1 | 6469 |
| P09874_C298 | PARP1 Polymerase 2 | 6470 |
| P55036_C58 | PSMD4 26S proteasome non-ATPase | 6471 |
| | regulatory subunit 4 | |
| A6NHR9_C1433 | SMCHD1 Structural maintenance of | 6472 |
| | chromosomes flexible hinge domain- | |
| | containing protein 1 | |
| Q2M2I8_C270 | AAK1 AP2-associated protein kinase 1 | 6473 |
| O14880_C56 | MGST3 Microsomal glutathione S- | 6474 |
| | transferase 3 | |
| Q9C0J8_C120 | WDR33 pre-mRNA 3 end processing | 6475 |
| | protein WDR33 | |
| Q96ME7_C430 | ZNF512 Zinc finger protein 512 | 6476 |
| Q01813_C641 | PFKP 6-phosphofructokinase type C | 6477 |
| P21333_C810 | FLNA Filamin-A | 6478 |
| P07858_C108 | CTSB Cathepsin B | 6479 |
| Q9UGI8_C22 | TES Testin | 6480 |
| P48047_C141 | ATP5O ATP synthase subunit O, | 6481 |
| | mitochondrial | |
| P27707_C59 | DCK Deoxycytidine kinase | 6482 |
| Q9C0J8_C249 | WDR33 pre-mRNA 3 end processing | 6483 |
| | protein WDR33 | |
| Q9UMS4_C298 | PRPF19 Pre-mRNA-processing factor | 6484 |
| | 19 | |
| P25705_C294 | ATP5A1 ATP synthase subunit alpha, | 6485 |
| | mitochondrial | |
| H3BQZ7_C518 | Uncharacterized protein | 6486 |
| Q1KMD3_C518 | HNRNPUL2 Heterogeneous nuclear | 6487 |
| | ribonucleoprotein U-like protein 2 | |
| Q8IW45_C82 | CARKD ATP-dependent (S)- | 6488 |
| | NAD(P)H-hydrate dehydratase | |
| P09110_C177 | ACAA1 3-ketoacyl-CoA thiolase, | 6489 |
| | peroxisomal | |
| P34949_C11 | MPI Mannose-6-phosphate isomerase | 6490 |
| Q7RTV0_C49 | PHF5A PHD finger-like domain- | 6491 |
| | containing protein 5A | |
| Q9BWD1_C65 | ACAT2 Acetyl-CoA acetyltransferase, | 6492 |
| | cytosolic | |
| P48735_C154 | IDH2 Isocitrate dehydrogenase | 6493 |
| P51665_C116 | PSMD7 26S proteasome non-ATPase | 6494 |
| | regulatory subunit 7 | |
| Q6YN16_C218 | HSDL2 Hydroxysteroid | 6495 |
| | dehydrogenase-like protein 2 | |
| P14866_C581 | HNRNPL Heterogeneous nuclear | 6496 |
| | ribonucleoprotein L | |
| P78417_C32 | GSTO1 Glutathione S-transferase | 6497 |
| | omega-1 | |
| P51610_C1872 | HCFC1 Host cell factor 1 | 6498 |
| Q86WV6_C206 | TMEM173 Transmembrane protein | 6499 |
| | 173 | |
| P08559_C181 | PDHA1 Pyruvate dehydrogenase E1 | 6500 |
| | component subunit alpha, somatic | |
| | form, mitochondrial | |
| O60318_C1285 | MCM3AP 80 kDa MCM3-associated | 6501 |
| | protein | |
| P78527_C4106 | PRKDC DNA-dependent protein | 6502 |
| | kinase catalytic subunit | |
| P31943_C34 | HNRNPH1 Heterogeneous nuclear | 6503 |
| | ribonucleoprotein H | |
| P62333_C170 | PSMC6 26S protease regulatory | 6504 |
| | subunit 10B | |
| O14776_C1062 | TCERG1 Transcription elongation | 6505 |
| | regulator 1 | |
| Q9Y3Z3_C341 | SAMHD1 SAM domain and HD | 6506 |
| | domain-containing protein 1 | |
| Q96GM5_C460 | SMARCD1 SWI/SNF-related matrix- | 6507 |
| | associated actin-dependent | |
| P29350_C361 | PTPN6 Tyrosine-protein phosphatase | 6508 |
| | non-receptor type 6 | |
| P14625_C645 | HSP90B1 Endoplasmin | 6509 |
| P10515_C586 | DLAT Dihydrolipoyllysine-residue | 6510 |
| | acetyltransferase component of | |
| | pyruvate dehydrogenase complex, | |
| | mitochondrial | |
| P02042_C94 | HBD Hemoglobin subunit delta | 6511 |
| P14174_C81 | MIF Macrophage migration inhibitory | 6512 |
| | factor | |
| P04083_C343 | ANXA1 Annexin A1 | 6513 |
| P04406_C247 | GAPDH Glyceraldehyde-3-phosphate | 6514 |
| | dehydrogenase | |
| O94901_C657 | SUN1 SUN domain-containing protein | 6515 |
| | 1 | |
| Q9UH99_C563 | SUN2 SUN domain-containing protein | 6516 |
| | 2 | |
| P13796_C42 | LCP1 Plastin-2 | 6517 |
| O95985_C217 | TOP3B DNA topoisomerase 3-beta-1 | 6518 |
| P00367_C376 | GLUD1 Glutamate dehydrogenase 1, | 6519 |
| | mitochondrial | |
| P49840_C380 | GSK3A Glycogen synthase kinase-3 | 6520 |
| | alpha | |
| P12814_C154 | ACTN1 Alpha-actinin-1 | 6521 |
| P55084_C458 | HADHB Trifunctional enzyme subunit | 6522 |
| | beta, mitochondrial | |
| P63220_C56 | RPS21 40S ribosomal protein S21 | 6523 |
| O43707_C173 | ACTN4 Alpha-actinin-4 | 6524 |
| Q49A26_C356 | GLYR1 Putative oxidoreductase | 6525 |
| | GLYR1 | |
| Q9NYL9_C231 | TMOD3 Tropomodulin-3 | 6526 |
| Q63HN8_C2943 | RNF213 E3 ubiquitin-protein ligase | 6527 |
| | RNF213 | |
| P27987_C740 | ITPKB Inositol-trisphosphate 3-kinase | 6528 |
| | B | |
| Q96F15_C185 | GIMAP5 GTPase IMAP family | 6529 |
| | member 5 | |
| Q13501_C131 | SQSTM1 Sequestosome-1 | 6530 |
| P00441_C147 | SOD1 Superoxide dismutase | 6531 |
| Q92616_C1362 | GCN1L1 Translational activator GCN1 | 6532 |
| Q08J23_C321 | NSUN2 tRNA (cytosine(34)-C(5))- | 6533 |
| | methyltransferase | |
| Q01518_C416 | CAP1 Adenylyl cyclase-associated | 6534 |
| | protein 1 | |
| P55735_C245 | SEC13 Protein SEC13 homolog | 6535 |
| P08133_C59 | ANXA6 Annexin A6 | 6536 |
| P62910_C96 | RPL32 60S ribosomal protein L32 | 6537 |
| P62306_C66 | SNRPF Small nuclear | 6538 |
| | ribonucleoprotein F | |
| I3L420_C311 | LSM14A Protein LSM14 homolog A | 6539 |
| Q8ND56_C375 | LSM14A Protein LSM14 homolog A | 6540 |
| P57737_C187 | CORO7 Coronin-7 | 6541 |
| Q96FS4_C609 | SIPA1 Signal-induced proliferation- | 6542 |
| | associated protein 1 | |
| Q8TD19_C487 | NEK9 Serine/threonine-protein kinase | 6543 |
| | Nek9 | |
| Q99567_C561 | NUP88 Nuclear pore complex protein | 6544 |
| | Nup88 | |
| P21333_C631 | FLNA Filamin-A | 6545 |
| P26583_C23 | HMGB2 High mobility group protein | 6546 |
| | B2 | |
| P09429_C23 | HMGB1 High mobility group protein | 6547 |
| | B1 | |
| Q99460_C898 | PSMD1 26S proteasome non-ATPase | 6548 |
| | regulatory subunit 1 | |
| Q92785_C53 | DPF2 Zinc finger protein ubi-d4 | 6549 |
| Q16822_C431 | PCK2 Phosphoenolpyruvate | 6550 |
| | carboxykinase | |
| O95671_C441 | ASMTL N-acetylserotonin O- | 6551 |
| | methyltransferase-like protein | |
| Q9UGI8_C412 | TES Testin | 6552 |
| Q13574_C905 | DGKZ Diacylglycerol kinase zeta | 6553 |
| Q9UGI8_C416 | TES Testin | 6554 |
| Q9NZA1_C191 | CLIC5 Chloride intracellular channel | 6555 |
| | protein 5 | |
| P43354_C566 | NR4A2 Nuclear receptor subfamily 4 | 6556 |
| | group A member 2 | |
| P22736_C566 | NR4A1 Nuclear receptor subfamily 4 | 6557 |
| | group A member 1 | |
| Q96EP0_C504 | RNF31 E3 ubiquitin-protein ligase | 6558 |
| | RNF31 | |
| P30048_C229 | PRDX3 Thioredoxin-dependent | 6559 |
| | peroxide reductase, mitochondrial | |
| P21333_C210 | FLNA Filamin-A | 6560 |
| Q08AF3_C627 | SLFN5 Schlafen family member 5 | 6561 |
| Q92608_C465 | DOCK2 Dedicator of cytokinesis | 6562 |
| | protein 2 | |
| O75592_C1868 | MYCBP2 Probable E3 ubiquitin- | 6563 |
| | protein ligase MYCBP2 | |
| P21333_C205 | FLNA Filamin-A | 6564 |
| P21333_C2160 | FLNA Filamin-A | 6565 |
| P30626_C57 | SRI Sorcin | 6566 |
| Q9P2T1_C348 | GMPR2 GMP reductase 2 | 6567 |
| Q52LJ0_C295 | FAM98B Protein FAM98B | 6568 |
| Q13813_C956 | SPTAN1 Spectrin alpha chain, non- | 6569 |
| | erythrocytic 1 | |
| Q8NCA5_C293 | FAM98A Protein FAM98A | 6570 |
| Q96G03_C573 | PGM2 Phosphoglucomutase-2 | 6571 |
| O75832_C107 | PSMD10 26S proteasome non-ATPase | 6572 |
| | regulatory subunit 10 | |
| O95372_C213 | LYPLA2 Acyl-protein thioesterase 2 | 6573 |
| Q5JVS0_C22 | HABP4 Intracellular hyaluronan- | 6574 |
| | binding protein 4 | |
| Q9BPZ7_C149 | MAPKAP1 Target of rapamycin | 6575 |
| | complex 2 subunit MAPKAP1 | |
| Q8NE71_C655 | ABCF1 ATP-binding cassette sub- | 6576 |
| | family F member 1 | |
| P48059_C100 | LIMS1 LIM and senescent cell antigen- | 6577 |
| | like-containing domain 1 | |
| Q13263_C83 | TRIM28 Transcription intermediary | 6578 |
| | factor 1-beta | |
| Q13263_C88 | TRIM28 Transcription intermediary | 6579 |
| | factor 1-beta | |
| Q13263_C91 | TRIM28 Transcription intermediary | 6580 |
| | factor 1-beta | |
| Q9Y4H4_C116 | GPSM3 G-protein-signaling modulator | 6581 |
| | 3 | |
| O00139_C537 | KIF2A Kinesin-like protein KIF2A | 6582 |
| A6NHR9_C897 | SMCHD1 Structural maintenance of | 6583 |
| | chromosomes flexible hinge domain | |
| | containing 1 | |
| Q12824_C350 | SMARCB1 SWI/SNF-related matrix- | 6584 |
| | associated actin-dependent | |
| Q96EP5_C85 | DAZAP1 DAZ-associated protein 1 | 6585 |
| Q96ME7_C413 | ZNF512 Zinc finger protein 512 | 6586 |
| Q13813_C1622 | SPTAN1 Spectrin alpha chain, non- | 6587 |
| | erythrocytic 1 | |
| Q8WWQ0_C28 | PHIP PH-interacting protein | 6588 |
| P22736_C303 | NR4A1 Nuclear receptor subfamily 4 | 6589 |
| | group A member 1 | |
| Q9P2N6_C459 | KANSL3 KAT8 regulatory NSL | 6590 |
| | complex subunit 3 | |
| Q93084_C447 | ATP2A3 Sarcoplasmic/endoplasmic | 6591 |
| | reticulum calcium ATPase | |
| Q92945_C436 | KHSRP Far upstream element-binding | 6592 |
| | protein 2 | |
| O75643_C1278 | SNRNP200 U5 small nuclear | 6593 |
| | ribonucleoprotein 200 kDa helicase | |
| P14866_C260 | HNRNPL Heterogeneous nuclear | 6594 |
| | ribonucleoprotein L | |
| H7BZ11_C83 | Uncharacterized protein | 6595 |
| H7BZ11_C88 | Uncharacterized protein | 6596 |
| Q969Q0_C72 | RPL36AL 60S ribosomal protein L36a- | 6597 |
| | like | |
| Q969Q0_C77 | RPL36AL 60S ribosomal protein L36a- | 6598 |
| | like | |
| P14866_C261 | HNRNPL Heterogeneous nuclear | 6599 |
| | ribonucleoprotein L | |
| P15927_C219 | RPA2 Replication protein A 32 kDa | 6600 |
| | subunit | |
| Q92598_C290 | HSPH1 Heat shock protein 105 kDa | 6601 |
| P22307_C71 | SCP2 Non-specific lipid-transfer | 6602 |
| | protein | |
| P26358_C896 | DNMT1 DNA (cytosine-5)- | 6603 |
| | methyltransferase 1 | |
| Q06830_C173 | PRDX1 Pcroxiredoxin-1 | 6604 |
| P42765_C287 | ACAA2 3-ketoacyl-CoA thiolase, | 6605 |
| | mitochondrial | |
| O75592_C2163 | MYCBP2 Probable E3 ubiquitin- | 6606 |
| | protein ligase MYCBP2 | |
| Q9Y4W2_C504 | LAS1L Ribosomal biogenesis protein | 6607 |
| | LAS1L | |
| A6NHR9_C1856 | SMCHD1 Structural maintenance of | 6608 |
| | chromosomes flexible hinge domain | |
| | containing 1 | |
| O75351_C240 | VPS4B Vacuolar protein sorting- | 6609 |
| | associated protein 4B | |
| P52333_C811 | JAK3 Tyrosine-protein kinase JAK3 | 6610 |
| P52564_C216 | MAP2K6 Dual specificity mitogen- | 6611 |
| | activated protein kinase | |
| P31146_C40 | CORO1A Coronin-1A | 6612 |
| P55072_C522 | VCP Transitional endoplasmic | 6613 |
| | reticulum ATPase | |
| P21333_C2293 | FLNA Filamin-A | 6614 |
| Q15233_C208 | NONO Non-POU domain-containing | 6615 |
| | octamer-binding protein | |
| P00492_C23 | HPRT1 Hypoxanthine-guanine | 6616 |
| | phosphoribosyltransferase | |
| O94804_C873 | STK10 Serine/threonine-protein kinase | 6617 |
| | 10 | |
| P36578_C96 | RPL4 60S ribosomal protein L4 | 6618 |
| P28838_C462 | LAP3 Cytosol aminopeptidase | 6619 |
| P52272_C676 | HNRNPM Heterogeneous nuclear | 6620 |
| | ribonucleoprotein M | |
| Q08AF3_C489 | SLFN5 Schlafen family member 5 | 6621 |
| Q9Y383_C59 | LUC7L2 Putative RNA-binding protein | 6622 |
| | Luc7-like 2 | |
| Q9NZ09_C45 | UBAP1 Ubiquitin-associated protein 1 | 6623 |
| Q14152_C404 | EIF3A Eukaryotic translation initiation | 6624 |
| | factor 3 subunit | |
| Q99496_C72 | RNF2 E3 ubiquitin-protein ligase | 6625 |
| | RING2 | |
| P30086_C133 | PEBP1 Phosphatidylethanolamine- | 6626 |
| | binding protein 1 | |
| Q93009_C90 | USP7 Ubiquitin carboxyl-terminal | 6627 |
| | hydrolase 7 | |
| P83731_C36 | RPL24 60S ribosomal protein L24 | 6628 |
| P83731_C6 | RPL24 60S ribosomal protein L24 | 6629 |
| Q92499_C110 | DDX1 ATP-dependent RNA helicase | 6630 |
| | DDX1 | |
| A6NHR9_C492 | SMCHD1 Structural maintenance of | 6631 |
| | chromosomes flexible hinge domain | |
| | containing 1 | |
| P34932_C290 | HSPA4 Heat shock 70 kDa protein 4 | 6632 |
| Q9H4B7_C12 | TUBB1 Tubulin beta-1 chain | 6633 |
| Q6PJG6_C326 | BRAT1 BRCA1-associated ATM | 6634 |
| | activator 1 | |
| Q9NZ08_C486 | ERAP1 Endoplasmic reticulum | 6635 |
| | aminopeptidase 1 | |
| Q5VZF2_C19 | MBNL2 Muscleblind-like protein 2 | 6636 |
| Q9NR56_C19 | MBNL1 Muscleblind-like protein 1 | 6637 |
| P55263_C353 | ADK Adenosine kinase | 6638 |
| Q8WUM4_C40 | PDCD61P Programmed cell death 6- | 6639 |
| | interacting protein | |
| P50579_C121 | METAP2 Methionine aminopeptidase 2 | 6640 |
| P21333_C1165 | FLNA Filamin-A | 6641 |
| Q2M2I8_C288 | AAK1 AP2-associated protein kinase 1 | 6642 |
| Q8N0W3_C484 | FUK L-fucose kinase | 6643 |
| P18621_C144 | RPL17 60S ribosomal protein L17 | 6644 |
| J3QL51_C144 | RPL17-C18ORF32 Protein RPL17- | 6645 |
| | C18ORF32 | |
| Q12906_C203 | ILF3 Interleukin enhancer-binding | 6646 |
| | factor 3 | |
| Q8N163_C754 | KIAA1967 DBIRD complex subunit | 6647 |
| | KIAA1967 | |
| Q6P1R4_C213 | DUS1L tRNA-dihydrouridine(16/17) | 6648 |
| | synthase | |
| Q9Y490_C2196 | TLN1 Talin-1 | 6649 |
| Q92947_C176 | GCDH Glutaryl-CoA dehydrogenase, | 6650 |
| | mitochondrial | |
| P21333_C1453 | FLNA Filamin-A | 6651 |
| P49411_C147 | TUFM Elongation factor Tu, | 6652 |
| | mitochondrial | |
| Q9BV38_C384 | WDR18 WD repeat-containing protein | 6653 |
| | 18 | |
| Q93008_C1566 | USP9X Probable ubiquitin carboxyl- | 6654 |
| | terminal hydrolase FAF | |
| O00507_C1568 | USP9Y Probable ubiquitin carboxyl- | 6655 |
| | terminal hydrolase FAF | |
| Q9BXL7_C1115 | CARD11 Caspase recruitment domain- | 6656 |
| | containing protein 11 | |
| Q9P2J5_C573 | LARS Leucine--tRNA ligase, | 6657 |
| | cytoplasmic | |
| O00541_C391 | PES1 Pescadillo homolog | 6658 |
| Q9Y228_C388 | TRAF3IP3 TRAF3-interacting JNK- | 6659 |
| | activating modulator | |
| O95747_C191 | OXSR1 Serine/threonine-protein kinase | 6660 |
| | OSR1 | |
| Q9UEW8_C237 | STK39 STE20/SPS1-related proline- | 6661 |
| | alanine-rich protein kinase | |
| Q8IVH4_C184 | MMAA Methylmalonic aciduria type A | 6662 |
| | protein, mitochondrial | |
| P49189_C484 | ALDH9A1 4- | 6663 |
| | trimethylaminobutyraldehyde | |
| | dehydrogenase | |
| P08238_C521 | HSP90AB1 Heat shock protein HSP | 6664 |
| | 90-beta | |
| Q8TDP1_C34 | RNASEH2C Ribonuclease H2 subunit | 6665 |
| | C | |
| P08575_C760 | PTPRC Receptor-type tyrosine-protein | 6666 |
| | phosphatase C | |
| I3L3Q1_C558 | Uncharacterized protein | 6667 |
| Q6ZSZ5_C600 | ARHGEF18 Rho guanine nucleotide | 6668 |
| | exchange factor 18 | |
| Q9Y490_C1661 | TLN1 Talin-1 | 6669 |
| Q9Y490_C1671 | TLN1 Talin-1 | 6670 |
| P53384_C235 | NUBP1 Cytosolic Fe—S cluster | 6671 |
| | assembly factor NUBP1 | |
| P49589_C204 | CARS Cysteine--tRNA ligase, | 6672 |
| | cytoplasmic | |
| P78527_C2469 | PRKDC DNA-dependent protein | 6673 |
| | kinase catalytic subunit | |
| Q9P2R3_C460 | ANKFY1 Ankyrin repeat and FYVE | 6674 |
| | domain-containing protein | |
| P33316_C222 | DUT Deoxyuridine 5-triphosphate | 6675 |
| | nucleotidohydrolase, mitochondrial | |
| E9PMF8_C694 | PTPRC Receptor-type tyrosine-protein | 6676 |
| | phosphatase C | |
| P49773_C84 | HINT1 Histidine triad nucleotide- | 6677 |
| | binding protein 1 | |
| Q9BRZ2_C514 | TRIM56 E3 ubiquitin-protein ligase | 6678 |
| | TRIM56 | |
| P35754_C83 | GLRX Glutaredoxin-1 | 6679 |
| Q9Y490_C1353 | TLN1 Talin-1 | 6680 |
| P61981_C97 | YWHAG 14-3-3 protein gamma | 6681 |
| Q15020_C341 | SART3 Squamous cell carcinoma | 6682 |
| | antigen recognized by T-cells 3 | |
| O60711_C199 | LPXN Leupaxin | 6683 |
| Q9ULT8_C2415 | HECTD1 E3 ubiquitin-protein ligase | 6684 |
| | HECTD1 | |
| Q99757_C90 | TXN2 Thioredoxin, mitochondrial | 6685 |
| Q99757_C93 | TXN2 Thioredoxin, mitochondrial | 6686 |
| Q13363_C134 | CTBP1 C-terminal-binding protein 1 | 6687 |
| O95571_C34 | ETHE1 Protein ETHE1, mitochondrial | 6688 |
| P31040_C311 | SDHA Succinate dehydrogenase | 6689 |
| P29466_C285 | CASP1 Caspase-1 | 6690 |
| Q9Y4F9_C35 | FAM65B Protein FAM65B | 6691 |
| P35754_C79 | GLRX Glutaredoxin-1 | 6692 |
| Q15149_C950 | PLEC Plectin | 6693 |
| Q13642_C71 | FHL1 Four and a half LIM domains | 6694 |
| | protein 1 | |
| Q00610_C753 | CLTC Clathrin heavy chain 1 | 6695 |
| Q15365_C293 | PCBP1 Poly(rC)-binding protein 1 | 6696 |
| P39023_C253 | RPL3 60S ribosomal protein L3 | 6697 |
| Q96QR8_C238 | PURB Transcriptional activator protein | 6698 |
| | Pur-beta | |
| P29590_C60 | PML Protein PML | 6699 |
| P07814_C1497 | EPRS Bifunctional glutamate/proline-- | 6700 |
| | tRNA ligase | |
| Q9BYW2_C667 | SETD2 Histone-lysine N- | 6701 |
| | methyltransferase SETD2 | |
| Q13469_C569 | NFATC2 Nuclear factor of activated T- | 6702 |
| | cells, cytoplasmic 2 | |
| P31040_C305 | SDHA Succinate dehydrogenase | 6703 |
| P40939_C550 | HADHA Trifunctional enzyme subunit | 6704 |
| | alpha, mitochondrial | |
| P68104_C411 | EEF1A1 Elongation factor 1-alpha 1 | 6705 |
| Q15365_C158 | PCBP1 Poly(rC)-binding protein 1 | 6706 |
| P26599_C250 | PTBP1 Polypyrimidine tract-binding | 6707 |
| | protein 1 | |
| P26599_C251 | PTBP1 Polypyrimidine tract-binding | 6708 |
| | protein 1 | |
| P10768_C176 | ESD S-formylglutathione hydrolase | 6709 |
| P10768_C181 | ESD S-formylglutathione hydrolase | 6710 |
| P30084_C62 | ECHS1 Enoyl-CoA hydratase, | 6711 |
| | mitochondrial | |
| Q15149_C3336 | PLEC Plectin | 6712 |
| P51610_C149 | HCFC1 Host cell factor 1 | 6713 |
| Q9BUJ2_C291 | HNRNPUL1 Heterogeneous nuclear | 6714 |
| | ribonucleoprotein U-like protein | |
| P11413_C385 | G6PD Glucose-6-phosphate 1- | 6715 |
| | dehydrogenase | |
| P00488_C410 | F13A1 Coagulation factor XIIIA chain | 6716 |
| Q9H8H3_C79 | METTL7A Methyltransferase-like | 6717 |
| | protein 7A | |
| Q9NZ08_C498 | ERAP1 Endoplasmic reticulum | 6718 |
| | aminopeptidase 1 | |
| O00303_C256 | EIF3F Eukaryotic translation initiation | 6719 |
| | factor 3 subunit | |
| O75643_C1127 | SNRNP200 U5 small nuclear | 6720 |
| | ribonucleoprotein 200 kDa helicas | |
| Q5T4S7_C1274 | UBR4 E3 ubiquitin-protein ligase | 6721 |
| | UBR4 | |
| Q14676_C2049 | MDC1 Mediator of DNA damage | 6722 |
| | checkpoint protein 1 | |
| Q9Y2X3_C205 | NOP58 Nucleolar protein 58 | 6723 |
| P31930_C453 | UQCRC1 Cytochrome b-c1 complex | 6724 |
| | subunit 1, mitochondrial | |
| Q15019_C111 | SEPT2 Septin-2 | 6725 |
| Q15149_C992 | PLEC Plectin | 6726 |
| Q29RF7_C1079 | PDS5A Sister chromatid cohesion | 6727 |
| | protein PDS5 homolog A | |
| Q6P2E9_C976 | EDC4 Enhancer of mRNA-decapping | 6728 |
| | protein 4 | |
| O00329_C474 | PIK3CD Phosphatidylinositol 4,5- | 6729 |
| | bisphosphate 3-kinase catalytic subunit | |
| | delta isoform | |
| P56192_C12 | MARS Methionine--tRNA ligase, | 6730 |
| | cytoplasmic | |
| P28838_C335 | LAP3 Cytosol aminopeptidase | 6731 |
| P30876_C1093 | POLR2B DNA-directed RNA | 6732 |
| | polymerase II subunit RPB2 | |
| P27635_C195 | RPL10 60S ribosomal protein L10 | 6733 |
| Q9Y490_C1392 | TLN1 Talin-1 | 6734 |
| P55884_C384 | EIF3B Eukaryotic translation initiation | 6735 |
| | factor 3 subunit | |
| Q9UGI8_C46 | TES Testin | 6736 |
| P61978_C184 | HNRNPK Heterogeneous nuclear | 6737 |
| | ribonucleoprotein K | |
| P31943_C122 | HNRNPH1 Heterogeneous nuclear | 6738 |
| | ribonucleoprotein H | |
| Q63HN8_C4348 | RNF213 E3 ubiquitin-protein ligase | 6739 |
| | RNF213 | |
| Q9Y490_C956 | TLN1 Talin-1 | 6740 |
| P08133_C96 | ANXA6 Annexin A6 | 6741 |
| P13667_C206 | PDLA4 Protein disulfide-isomerase A4 | 6742 |
| Q7Z434_C33 | MAVS Mitochondrial antiviral- | 6743 |
| | signaling protein | |
| Q9UKX7_C416 | NUP50 Nuclear pore complex protein | 6744 |
| | Nup50 | |
| Q2M2I8_C319 | AAK1 AP2-associated protein kinase 1 | 6745 |
| Q13547_C100 | HDAC1 Histone deacetylase 1 | 6746 |
| Q13547_C110 | HDAC1 Histone deacetylase 1 | 6747 |
| P13667_C209 | PDIA4 Protein disulfide-isomerase A4 | 6748 |
| P55795_C122 | HNRNPH2 Heterogeneous nuclear | 6749 |
| | ribonucleoprotein H2 | |
| O95544_C79 | NADK NAD kinase | 6750 |
| P62140_C154 | PPP1CB Serine/threonine-protein | 6751 |
| | phosphatase PP1-beta catalytic subunit | |
| P62136_C155 | PPP1CA Serine/threonine-protein | 6752 |
| | phosphatase PP1-alpha catalytic | |
| | subunit | |
| P36873_C155 | PPP1CC Serine/threonine-protein | 6753 |
| | phosphatase PP1-gamma catalytic | |
| | subunit | |
| P53597_C172 | SUCLG1 Succinyl-CoA ligase | 6754 |
| O95071_C730 | UBR5 E3 ubiquitin-protein ligase | 6755 |
| | UBR5 | |
| P22314_C632 | UBA1 Ubiquitin-like modifier- | 6756 |
| | activating enzyme 1 | |
| Q9UBT2_C173 | UBA2 SUMO-activating enzyme | 6757 |
| | subunit 2 | |
| P55072_C572 | VCP Transitional endoplasmic | 6758 |
| | reticulum ATPase | |
| O00329_C90 | PIK3CD Phosphatidylinositol 4,5- | 6759 |
| | bisphosphate 3-kinase catalytic subunit | |
| | delta isoform | |
| Q9UGI8_C238 | TES Testin | 6760 |
| Q14204_C2142 | DYNC1H1 Cytoplasmic dynein 1 | 6761 |
| | heavy chain 1 | |
| Q9Y692_C113 | GMEB1 Glucocorticoid modulatory | 6762 |
| | element-binding protein | |
| Q9UKD1_C110 | GMEB2 Glucocorticoid modulatory | 6763 |
| | element-binding protein | |
| P43686_C210 | PSMC4 26S protease regulatory | 6764 |
| | subunit 6B | |
| O95232_C58 | LUC7L3 Luc7-like protein 3 | 6765 |
| P27695_C99 | APEX1 DNA-(apurinic or apyrimidinic | 6766 |
| | site) lyase | |
| P23743_C432 | DGKA Diacylglycerol kinase alpha | 6767 |
| Q08J23_C93 | NSUN2 tRNA (cytosine(34)-C(5))- | 6768 |
| | methyltransferase | |
| Q92616_C1482 | GCN1L1 Translational activator GCN1 | 6769 |
| Q9Y4B6_C1227 | VPRBP Protein VPRBP | 6770 |
| Q9Y6D5_C1450 | ARFGEF2 Brefeldin A-inhibited | 6771 |
| | guanine nucleotide-exchange | |
| Q6F5E8_C698 | RLTPR Leucine-rich repeat-containing | 6772 |
| | protein 16C | |
| P21964_C119 | COMT Catechol O-methyltransferase | 6773 |
| Q15365_C163 | PCBP1 Poly(rC)-binding protein 1 | 6774 |
| O14617_C208 | AP3D1 AP-3 complex subunit delta-1 | 6775 |
| P53597_C181 | SUCLG1 Succinyl-CoA ligase | 6776 |
| P53582_C14 | METAP1 Methionine aminopeptidase 1 | 6777 |
| Q00839_C497 | HNRNPU Heterogeneous nuclear | 6778 |
| | ribonucleoprotein U | |
| Q9Y6W5_C27 | WASF2 Wiskott-Aldrich syndrome | 6779 |
| | protein family member 2 | |
| Q99439_C164 | CNN2 Calponin-2 | 6780 |
| Q9NVG8_C145 | TBC1D13 TBC1 domain family | 6781 |
| | member 13 | |
| P10768_C56 | ESD S-formylglutathione hydrolase | 6782 |
| P31146_C345 | CORO1A Coronin-1A | 6783 |
| O75521_C380 | ECI2 Enoyl-CoA delta isomerase 2, | 6784 |
| | mitochondrial | |
| P13796_C336 | LCP1 Plastin-2 | 6785 |
| Q15149_C4574 | PLEC Plectin | 6786 |
| P98171_C569 | ARHGAP4 Rho GTPase-activating | 6787 |
| | protein 4 | |
| P48059_C272 | LIMS1 LIM and senescent cell antigen- | 6788 |
| | like-containing domain 1 | |
| Q86WV6_C257 | TMEM173 Transmembrane protein | 6789 |
| | 173 | |
| P23743_C707 | DGKA Diacylglycerol kinase alpha | 6790 |
| Q14204_C3573 | DYNC1H1 Cytoplasmic dynein 1 | 6791 |
| | heavy chain 1 | |
| P22061_C95 | PCMT1 Protein-L-isoaspartate(D- | 6792 |
| | aspartate) O-methyltransferase | |
| Q86W42_C35 | THOC6 THO complex subunit 6 | 6793 |
| | homolog | |
| P55072_C535 | VCP Transitional endoplasmic | 6794 |
| | reticulum ATPase | |
| Q07666_C264 | KHDRBS1 KH domain-containing, | 6795 |
| | RNA-binding, signal transduction | |
| | associated 1 | |
| O00139_C334 | KIF2A Kinesin-like protein KIF2A | 6796 |
| P30481_C188 | HLA-B HLA class I histocompatibility | 6797 |
| | antigen, B-44 alpha | |
| P30483_C188 | HLA-B HLA class I histocompatibility | 6798 |
| | antigen, B-45 alpha | |
| Q8WV92_C233 | MITD1 MIT domain-containing protein | 6799 |
| | 1 | |
| P49207_C83 | RPL34 60S ribosomal protein L34 | 6800 |
| P24752_C119 | ACAT1 Acetyl-CoA acetyltransferase, | 6801 |
| | mitochondrial | |
| P24752_C413 | ACAT1 Acetyl-CoA acetyltransferase, | 6802 |
| | mitochondrial | |
| Q14141_C42 | SEPT6 Septin-6 | 6803 |
| O95319_C174 | CELF2 CUGBP Elav-like family | 6804 |
| | member 2 | |
| O15144_C120 | ARPC2 Actin-related protein 2/3 | 6805 |
| | complex subunit 2 | |
| Q9NTK5_C55 | OLA1 Obg-like ATPase 1 | 6806 |
| Q9Y490_C1953 | TLN1 Talin-1 | 6807 |
| P42331_C258 | ARHGAP25 Rho GTPase-activating | 6808 |
| | protein 25 | |
| O75643_C1580 | SNRNP200 U5 small nuclear | 6809 |
| | ribonucleoprotein 200 kDa helicas | |
| P27635_C49 | RPL10 60S ribosomal protein L10 | 6810 |
| P04075_C202 | ALDOA Fructose-bisphosphate | 6811 |
| | aldolase A | |
| Q92616_C2255 | GCN1L1 Translational activator GCN1 | 6812 |
| Q15149_C3299 | PLEC Plectin | 6813 |
| O94776_C209 | MTA2 Metastasis-associated protein | 6814 |
| | MTA2 | |
| O95466_C69 | FMNL1 Formin-like protein 1 | 6815 |
| P09972_C202 | ALDOC Fructose-bisphosphate | 6816 |
| | aldolase C | |
| Q16186_C80 | ADRM1 Proteasomal ubiquitin | 6817 |
| | receptor ADRM1 | |
| Q9Y224_C19 | C14orf166 UPF0568 protein | 6818 |
| | C14orf166 | |
| P23743_C253 | DGKA Diacylglycerol kinase alpha | 6819 |
| Q13464_C29 | ROCK1 Rho-associated protein kinase | 6820 |
| | 1 | |
| O14617_C1133 | AP3D1 AP-3 complex subunit delta-1 | 6821 |
| P05062_C202 | ALDOB Fructose-bisphosphate | 6822 |
| | aldolase B | |
| O95154_C186 | AKR7A3 Aflatoxin B1 aldehyde | 6823 |
| | reductase member 3 | |
| Q8NHP1_C186 | AKR7L Aflatoxin B1 aldehyde | 6824 |
| | reductase member 4 | |
| O43488_C214 | AKR7A2 Aflatoxin B1 aldehyde | 6825 |
| | reductase member 2 | |
| P23246_C431 | SFPQ Splicing factor, proline- and | 6826 |
| | glutamine-rich | |
| O00268_C867 | TAF4 Transcription initiation factor | 6827 |
| | TFTTD subunit 4 | |
| P61158_C12 | ACTR3 Actin-related protein 3 | 6828 |
| P21333_C2601 | FLNA Filamin-A | 6829 |
| O00567_C384 | NOP56 Nucleolar protein 56 | 6830 |
| P46776_C70 | RPL27A 60S ribosomal protein L27a | 6831 |
| P68366_C54 | TUBA4A Tubulin alpha-4A chain | 6832 |
| P68366_C295 | TUBA4A Tubulin alpha-4A chain | 6833 |
| Q71U36_C295 | TUBA1A Tubulin alpha-1A chain | 6834 |
| P62829_C125 | RPL23 60S ribosomal protein L23 | 6835 |
| O95881_C66 | TXNDC12 Thioredoxin domain- | 6836 |
| | containing protein 12 | |
| P50552_C64 | VASP Vasodilator-stimulated | 6837 |
| | phosphoprotein | |
| Q9UJU6_C127 | DBNL Drebrin-like protein | 6838 |
| Q9UNH7_C264 | SNX6 Sorting nexin-6 | 6839 |
| Q8WVJ2_C99 | NUDCD2 NudC domain-containing | 6840 |
| | protein 2 | |
| Q9Y490_C1486 | TLN1 Talin-1 | 6841 |
| Q8WYJ6_C231 | SEPT1 Septin-1 | 6842 |
| Q15149_C317 | PLEC Plectin | 6843 |
| Q15027_C79 | ACAP1 Arf-GAP with coiled-coil, | 6844 |
| | ANK repeat and PH domain 1 | |
| Q9BXJ9_C322 | NAA15 N-alpha-acetyltransferase 15, | 6845 |
| | NatA auxiliary subunit | |
| Q86YV0_C447 | RASAL3 RAS protein activator like-3 | 6846 |
| Q63HN8_C2918 | RNF213 E3 ubiquitin-protein ligase | 6847 |
| | RNF213 | |
| P61158_C8 | ACTR3 Actin-related protein 3 | 6848 |
| Q8WWQ0_C1144 | PHIP PH-interacting protein | 6849 |
| Q9Y490_C1478 | TLN1 Talin-1 | 6850 |
| Q10567_C95 | AP1B1 AP-1 complex subunit beta-1 | 6851 |
| Q13748_C295 | TUBA3D Tubulin alpha-3C/D chain | 6852 |
| Q8N1G4_C224 | LRRC47 Leucine-rich repeat- | 6853 |
| | containing protein 47 | |
| E9PPU0_C611 | EPPK1 Epiplakin | 6854 |
| Q92878_C102 | RAD50 DNA repair protein RAD50 | 6855 |
| Q9UKE5_C202 | TNIK TRAF2 and NCK-interacting | 6856 |
| | protein kinase | |
| Q96FV9_C445 | THOC1 THO complex subunit 1 | 6857 |
| Q92747_C162 | ARPC1A Actin-related protein 2/3 | 6858 |
| | complex subunit 1A | |
| O15143_C162 | ARPC1B Actin-related protein 2/3 | 6859 |
| | complex subunit 1B | |
| P12236_C160 | SLC25A6 ADP/ATP translocase 3 | 6860 |
| P05141_C160 | SLC25A5 ADP/ATP translocase 2 | 6861 |
| Q13315_C2021 | ATM Serine-protein kinase ATM | 6862 |
| P50990_C244 | CCT8 T-complex protein 1 subunit | 6863 |
| | theta | |
| Q00839_C607 | HNRNPU Heterogeneous nuclear | 6864 |
| | ribonucleoprotein U | |
| P10809_C442 | HSPD1 60 kDa heat shock protein, | 6865 |
| | mitochondrial | |
| Q676U5_C145 | ATG16L1 Autophagy-related protein | 6866 |
| | 16-1 | |
| Q86UX7_C235 | FERMT3 Fermitin family homolog 3 | 6867 |
| P21333_C1353 | FLNA Filamin-A | 6868 |
| Q56VL3_C27 | OCIAD2 OCIA domain-containing | 6869 |
| | protein 2 | |
| Q14204_C1977 | DYNC1H1 Cytoplasmic dynein 1 | 6870 |
| | heavy chain 1 | |
| Q9NUV9_C187 | GIMAP4 GTPase IMAP family | 6871 |
| | member 4 | |
| P52272_C114 | HNRNPM Heterogeneous nuclear | 6872 |
| | ribonucleoprotein M | |
| P78527_C3781 | PRKDC DNA-dependent protein | 6873 |
| | kinase catalytic subunit | |
| P39023_C114 | RPL3 60S ribosomal protein L3 | 6874 |
| Q14202_C1326 | ZMYM3 Zinc finger MYM-type | 6875 |
| | protein 3 | |
| O43684_C129 | BUB3 Mitotic checkpoint protein | 6876 |
| | BUB3 | |
| Q8N2I2_C302 | ZNF619 Zinc finger protein 619 | 6877 |
| Q92900_C657 | UPF1 Regulator of nonsense transcripts | 6878 |
| | 1 | |
| Q00839_C389 | HNRNPU Heterogeneous nuclear | 6879 |
| | ribonucleoprotein U | |
| Q00839_C391 | HNRNPU Heterogeneous nuclear | 6880 |
| | ribonucleoprotein U | |
| Q9Y3U8_C48 | RPL36 60S ribosomal protein L36 | 6881 |
| Q7L2J0_C177 | MEPCE 7SK snRNA methylphosphate | 6882 |
| | capping enzyme | |
| Q01518_C93 | CAP1 Adenylyl cyclase-associated | 6883 |
| | protein 1 | |
| P55769_C30 | NHP2L1 NHP2-like protein 1 | 6884 |
| P46776_C144 | RPL27A 60S ribosomal protein L27a | 6885 |
| Q9H3P7_C129 | ACBD3 Golgi resident protein GCP60 | 6886 |
| Q9NQR4_C153 | NIT2 Omega-amidase NIT2 | 6887 |
| O60216_C392 | RAD21 Double-strand-break repair | 6888 |
| | protein rad21 homolog | |
| P13639_C67 | EEF2 Elongation factor 2 | 6889 |
| Q8WWP7_C76 | GIMAP1 GTPase IMAP family | 6890 |
| | member 1 | |
| Q9NTI5_C1069 | PDS5B Sister chromatid cohesion | 6891 |
| | protein PDS5 homolog B | |
| P41091_C105 | EIF2S3 Eukaryotic translation initiation | 6892 |
| | factor 2 subunit | |
| Q9Y2I8_C417 | WDR37 WD repeat-containing protein | 6893 |
| | 37 | |
| P52566_C76 | ARHGDIB Rho GDP-dissociation | 6894 |
| | inhibitor 2 | |
| Q9BSJ8_C522 | ESYT1 Extended synaptotagmin-1 | 6895 |
| Q8N163_C238 | KIAA1967 DBIRD complex subunit | 6896 |
| | KIAA1967 | |
| Q92835_C672 | INPP5D Phosphatidylinositol 3,4,5- | 6897 |
| | trisphosphate 5-phosphatase | |
| Q8NB90_C672 | SPATA5 Spermatogenesis-associated | 6898 |
| | protein 5 | |
| Q92878_C157 | RAD50 DNA repair protein RAD50 | 6899 |
| Q15370_C89 | TCEB2 Transcription elongation factor | 6900 |
| | B polypeptide 2 | |
| Q9UNF1_C516 | MAGED2 Melanoma-associated | 6901 |
| | antigen D2 | |
| Q08AF3_C48 | SLFN5 Schlafen family member 5 | 6902 |
| Q01082_C1900 | SPTBN1 Spectrin beta chain, non- | 6903 |
| | erythrocytic 1 | |
| Q8IUI8_C154 | CRLF3 Cytokine receptor-like factor 3 | 6904 |
| P57737_C505 | CORO7 Coronin-7 | 6905 |
| O95336_C237 | PGLS 6-phosphogluconolactonase | 6906 |
| O15372_C327 | EIF3H Eukaryotic translation initiation | 6907 |
| | factor 3 subunit | |
| Q63HN8_C3609 | RNF213 E3 ubiquitin-protein ligase | 6908 |
| | RNF213 | |
| P00367_C327 | GLUD1 Glutamate dehydrogenase 1, | 6909 |
| | mitochondrial | |
| Q15185_C76 | PTGES3 Prostaglandin E synthase 3 | 6910 |
| Q86UX7_C439 | FERMT3 Fermitin family homolog 3 | 6911 |
| A6NHR9_C458 | SMCHD1 Structural maintenance of | 6912 |
| | chromosomes flexible hinge domain- | |
| | containing protein 1 | |
| P49448_C327 | GLUD2 Glutamate dehydrogenase 2, | 6913 |
| | mitochondrial | |
| Q15052_C530 | ARHGEF6 Rho guanine nucleotide | 6914 |
| | exchange factor 6 | |
| H3BQZ7_C538 | Uncharacterized protein | 6915 |
| Q1KMD3_C538 | HNRNPUL2 Heterogeneous nuclear | 6916 |
| | ribonucleoprotein U-like protein 2 | |
| P11413_C13 | G6PD Glucose-6-phosphate 1- | 6917 |
| | dehydrogenase | |
| P57737_C34 | CORO7 Coronin-7 | 6918 |
| P55735_C187 | SEC13 Protein SEC13 homolog | 6919 |
| P68366_C315 | TUBA4A Tubulin alpha-4A chain | 6920 |
| P68366_C316 | TUBA4A Tubulin alpha-4A chain | 6921 |
| Q71U36_C315 | TUBA1A Tubulin alpha-1A chain | 6922 |
| Q71U36_C316 | TUBA1A Tubulin alpha-1A chain | 6923 |
| P31146_C195 | CORO1A Coronin-1A | 6924 |
| P68371_C354 | TUBB4B Tubulin beta-4B chain | 6925 |
| P07437_C354 | TUBB Tubulin beta chain | 6926 |
| P29350_C102 | PTPN6 Tyrosine-protein phosphatase | 6927 |
| | non-receptor type 6 | |
| P21333_C1260 | FLNA Filamin-A | 6928 |
| P08670_C328 | VIM Vimentin | 6929 |
| P42167_C363 | TMPO Lamina-associated polypeptide | 6930 |
| | 2, isoforms beta/gamma | |
| Q9H0C8_C325 | ILKAP Integrin-linked kinase- | 6931 |
| | associated serine/threonine | |
| Q66K74_C342 | MAP1S Microtubule-associated protein | 6932 |
| | 1S | |
| Q7KZF4_C560 | SND1 Staphylococcal nuclease | 6933 |
| | domain-containing protein | |
| Q9P1F3_C39 | ABRACL Costars family protein | 6934 |
| | ABRACL | |
| P36507_C211 | MAP2K2 Dual specificity mitogen- | 6935 |
| | activated protein kinase | |
| Q02750_C207 | MAP2K1 Dual specificity mitogen- | 6936 |
| | activated protein kinase | |
| Q8NF50_C685 | DOCK8 Dedicator of cytokinesis | 6937 |
| | protein 8 | |
| Q9BVA1_C354 | TUBB2B Tubulin beta-2B chain | 6938 |
| P36578_C125 | RPL4 60S ribosomal protein L4 | 6939 |
| Q8TD19_C890 | NEK9 Serine/threonine-protein kinase | 6940 |
| | Nek9 | |
| A6NHR9_C1286 | SMCHD1 Structural maintenance of | 6941 |
| | chromosomes flexible hinge domain- | |
| | containing protein 1 | |
| Q9BSD7_C110 | NTPCR Cancer-related nucleoside- | 6942 |
| | triphosphatase | |
| Q14573_C1638 | ITPR3 Inositol 1,4,5-trisphosphate | 6943 |
| | receptor type 3 | |
| Q12874_C274 | SF3A3 Splicing factor 3A subunit 3 | 6944 |
| Q13045_C337 | FLII Protein flightless-1 homolog | 6945 |
| Q8IY67_C255 | RAVER1 Ribonucleoprotein PTB- | 6946 |
| | binding 1 | |
| P13639_C728 | EEF2 Elongation factor 2 | 6947 |
| P53990_C125 | IST1 IST1 homolog | 6948 |
| P13796_C618 | LCP1 Plastin-2 | 6949 |
| Q9BWM7_C193 | SFXN3 Sideroflexin-3 | 6950 |
| Q9H9B4_C190 | SFXN1 Sideroflexin-1 | 6951 |
| P31146_C192 | CORO1A Coronin-1A | 6952 |
| Q15024_C85 | EXOSC7 Exosome complex | 6953 |
| | component RRP42 | |
| Q8N4C8_C202 | MINK1 Misshapen-like kinase 1 | 6954 |
| O95819_C202 | MAP4K4 Mitogen-activated protein | 6955 |
| | kinase kinase kinase kinase | |
| P13798_C30 | APEH Acylamino-acid-releasing | 6956 |
| | enzyme | |
| P35579_C172 | MYH9 Myosin-9 | 6957 |
| P30626_C194 | SRI Sorcin | 6958 |
| O15371_C19 | EIF3D Eukaryotic translation initiation | 6959 |
| | factor 3 subunit | |
| O00567_C211 | NOP56 Nucleolar protein 56 | 6960 |
| Q9UGI8_C196 | TES Testin | 6961 |
| P67936_C247 | TPM4 Tropomyosin alpha-4 chain | 6962 |
| P45954_C175 | ACADSB Short/branched chain | 6963 |
| | specific acyl-CoA dehydrogenase | |
| Q14566_C301 | MCM6 DNA replication licensing | 6964 |
| | factor MCM6 | |
| P50990_C149 | CCT8 T-complex protein 1 subunit | 6965 |
| | theta | |
| Q08945_C200 | SSRP1 FACT complex subunit SSRP1 | 6966 |
| P45985_C246 | MAP2K4 Dual specificity mitogen- | 6967 |
| | activated protein kinase | |
| P21333_C2582 | FLNA Filamin-A | 6968 |
| P29590_C213 | PML Protein PML | 6969 |
| P13489_C30 | RNH1 Ribonuclease inhibitor | 6970 |
| Q13315_C2770 | ATM Serine-protein kinase ATM | 6971 |
| Q9NR56_C34 | MBNL1 Muscleblind-like protein 1 | 6972 |
| Q08AF3_C114 | SLFN5 Schlafen family member 5 | 6973 |
| Q53EL6_C150 | PDCD4 Programmed cell death protein | 6974 |
| | 4 | |
| Q9NPJ6_C162 | MED4 Mediator of RNA polymerase II | 6975 |
| | transcription subunit | |
| P25398_C92 | RPS12 40S ribosomal protein S12 | 6976 |
| P57737_C303 | CORO7 Coronin-7 | 6977 |
| Q96RL1_C283 | UIMC1 BRCA1-A complex subunit | 6978 |
| | RAP80 | |
| P24928_C1245 | POLR2A DNA-directed RNA | 6979 |
| | polymerase II subunit RPB1 | |
| P17858_C89 | PFKL 6-phosphofructokinase, liver | 6980 |
| | type | |
| P50995_C226 | ANXA11 Annexin A11 | 6981 |
| Q7Z460_C1428 | CLASP1 CLIP-associating protein 1 | 6982 |
| O75122_C1184 | CLASP2 CLIP-associating protein 2 | 6983 |
| Q14008_C1344 | CKAP5 Cytoskeleton-associated | 6984 |
| | protein 5 | |
| Q14008_C1360 | CKAP5 Cytoskeleton-associated | 6985 |
| | protein 5 | |
| P16455_C145 | MGMT Methylated-DNA--protein- | 6986 |
| | cysteine methyltransferase | |
| O14976_C190 | GAK Cyclin-G-associated kinase | 6987 |
| Q14103_C226 | HNRNPD Heterogeneous nuclear | 6988 |
| | ribonucleoprotein D0 | |
| P11586_C918 | MTHFD1 C-1-tetrahydrofolate | 6989 |
| | synthase, cytoplasmic | |
| Q14008_C1350 | CKAP5 Cytoskeleton-associated | 6990 |
| | protein 5 | |
| P42704_C484 | LRPPRC Leucine-rich PPR motif- | 6991 |
| | containing protein, mitochondrial | |
| P50990_C148 | CCT8 T-complex protein 1 subunit | 6992 |
| | theta | |
| P33992_C197 | MCM5 DNA replication licensing | 6993 |
| | factor MCM5 | |
| O43143_C190 | DHX15 Putative pre-mRNA-splicing | 6994 |
| | factor ATP-dependent RN | |
| P07814_C381 | EPRS Bifunctional glutamate/proline-- | 6995 |
| | tRNA ligase | |
| P24928_C13 | POLR2A DNA-directed RNA | 6996 |
| | polymerase II subunit RPB1 | |
| P24928_C1287 | POLR2A DNA-directed RNA | 6997 |
| | polymerase II subunit RPB1 | |
| P42858_C664 | HTT Huntingtin | 6998 |
| Q13155_C23 | AIMP2 Aminoacyl tRNA synthase | 6999 |
| | complex-interacting multif | |
| Q14203_C1252 | DCTN1 Dynactin subunit 1 | 7000 |
| P68366_C347 | TUBA4A Tubulin alpha-4A chain | 7001 |
| Q00839_C648 | HNRNPU Heterogeneous nuclear | 7002 |
| | ribonucleoprotein U | |
| Q92616_C2558 | GCN1L1 Translational activator GCN1 | 7003 |
| Q86SX6_C67 | GLRX5 Glutaredoxin-related protein 5, | 7004 |
| | mitochondrial | |
| P24752_C196 | ACAT1 Acetyl-CoA acetyltransferase, | 7005 |
| | mitochondrial | |
| O75150_C950 | RNF40 E3 ubiquitin-protein ligase | 7006 |
| | BRE1B | |
| P62979_C149 | RPS27A Ubiquitin-40S ribosomal | 7007 |
| | protein S27a | |
| Q9Y3A3_C134 | MOB4 MOB-like protein phocein | 7008 |
| Q8IUI8_C95 | CRLF3 Cytokine receptor-like factor 3 | 7009 |
| Q96SK2_C295 | TMEM209 Transmembrane protein | 7010 |
| | 209 | |
| P21964_C238 | COMT Catechol O-methyltransferase | 7011 |
| P62753_C100 | RPS6 40S ribosomal protein S6 | 7012 |
| Q9Y3Z3_C522 | SAMHD1 SAM domain and HD | 7013 |
| | domain-containing protein 1 | |
| Q12802_C2142 | AKAP13 A-kinase anchor protein 13 | 7014 |
| Q14697_C502 | GANAB Neutral alpha-glucosidase AB | 7015 |
| P62826_C112 | RAN GTP-binding nuclear protein Ran | 7016 |
| O15379_C94 | HDAC3 Histone deacetylase 3 | 7017 |
| P13010_C296 | XRCC5 X-ray repair cross- | 7018 |
| | complementing protein 5 | |
| Q9Y5Y2_C54 | NUBP2 Cytosolic Fe—S cluster | 7019 |
| | assembly factor NUBP2 | |
| Q9BRJ7_C171 | NUDT16L1 Protein syndesmos | 7020 |
| P35579_C91 | MYH9 Myosin-9 | 7021 |
| P46940_C494 | IQGAP1 Ras GTPase-activating-like | 7022 |
| | protein IQGAP1 | |
| Q6F5E8_C823 | RLTPR Leucine-rich repeat-containing | 7023 |
| | protein 16C | |
| Q8IX12_C465 | CCAR1 Cell division cycle and | 7024 |
| | apoptosis regulator protein 1 | |
| Q6F5E8_C582 | RLTPR Leucine-rich repeat-containing | 7025 |
| | protein 16C | |
| Q13148_C198 | TARDBP TAR DNA-binding protein | 7026 |
| | 43 | |
| Q9Y6N5_C337 | SQRDL Sulfide:quinone | 7027 |
| | oxidoreductase, mitochondrial | |
| Q02880_C204 | TOP2B DNA topoisomerase 2-beta | 7028 |
| P62826_C120 | RAN GTP-binding nuclear protein Ran | 7029 |
| Q8NBN7_C30 | RDH13 Retinol dehydrogenase 13 | 7030 |
| P62979_C145 | RPS27A Ubiquitin-40S ribosomal | 7031 |
| | protein S27a | |
| P41250_C471 | GARS Glycine--tRNA ligase | 7032 |
| P46940_C781 | IQGAP1 Ras GTPase-activating-like | 7033 |
| | protein IQGAP1 | |
| P42765_C92 | ACAA2 3-ketoacyl-CoA thiolase, | 7034 |
| | mitochondrial | |
| Q8WWP7_C186 | GIMAP1 GTPase IMAP family | 7035 |
| | member 1 | |
| P49207_C49 | RPL34 60S ribosomal protein L34 | 7036 |
| Q8IUI8_C313 | CRLF3 Cytokine receptor-like factor 3 | 7037 |
| P17655_C301 | CAPN2 Calpain-2 catalytic subunit | 7038 |
| Q13526_C113 | PIN1 Peptidyl-prolyl cis-trans | 7039 |
| | isomerase NIMA-interacti | |
| O60313_C375 | OPA1 Dynamin-like 120 kDa protein, | 7040 |
| | mitochondrial | |
| P68371_C303 | TUBB4B Tubulin beta-4B chain | 7041 |
| P07437_C303 | TUBB Tubulin beta chain | 7042 |
| Q9UPN7_C37 | PPP6R1 Serine/threonine-protein | 7043 |
| | phosphatase 6 regulatory | |
| Q96SW2_C188 | CRBN Protein cereblon | 7044 |
| O14980_C1070 | XPO1 Exportin-1 | 7045 |
| Q15366_C109 | PCBP2 Poly(rC)-binding protein 2 | 7046 |
| P30154_C402 | PPP2R1B Serine/threonine-protein | 7047 |
| | phosphatase 2A 65 kDa regulatory | |
| | subunit A beta isoform | |
| P30153_C390 | PPP2R1A Serine/threonine-protein | 7048 |
| | phosphatase 2A 65 kDa regulatory | |
| | subunit A alpha isoform | |
| P07195_C294 | LDHB L-lactate dehydrogenase B | 7049 |
| | chain | |
| P31943_C22 | HNRNPH1 Heterogeneous nuclear | 7050 |
| | ribonucleoprotein H | |
| P53582_C40 | METAP1 Methionine aminopeptidase 1 | 7051 |
| P61221_C88 | ABCE1 ATP-binding cassette sub- | 7052 |
| | family E member 1 | |
| P49207_C46 | RPL34 60S ribosomal protein L34 | 7053 |
| P13639_C651 | EEF2 Elongation factor 2 | 7054 |
| Q9BVA1_C303 | TUBB2B Tubulin beta-2B chain | 7055 |
| Q01082_C604 | SPTBN1 Spectrin beta chain, non- | 7056 |
| | erythrocytic 1 | |
| Q9Y490_C1045 | TLN1 Talin-1 | 7057 |
| Q15366_C158 | PCBP2 Poly(rC)-binding protein 2 | 7058 |
| O95573_C450 | ACSL3 Long-chain-fatty-acid--CoA | 7059 |
| | ligase 3 | |
| Q9BT78_C378 | COPS4 COP9 signalosome complex | 7060 |
| | subunit 4 | |
| Q53EL6_C288 | PDCD4 Programmed cell death protein | 7061 |
| | 4 | |
| Q92841_C319 | DDX17 Probable ATP-dependent RNA | 7062 |
| | helicase DDX17 | |
| P49411_C127 | TUFM Elongation factor Tu, | 7063 |
| | mitochondrial | |
| Q96P65_C201 | QRFPR Pyroglutamylated RFamide | 7064 |
| | peptide receptor | |
| P46734_C227 | MAP2K3 Dual specificity mitogen- | 7065 |
| | activated protein kinase | |
| P48643_C253 | CCT5 T-complex protein 1 subunit | 7066 |
| | epsilon | |
| Q96GX9_C147 | APIP Probable methylthioribulose-1- | 7067 |
| | phosphate dehydratase | |
| O00567_C112 | NOP56 Nucleolar protein 56 | 7068 |
| Q92835_C819 | INPP5D Phosphatidylinositol 3,4,5- | 7069 |
| | trisphosphate 5-phospha | |
| P21333_C623 | FLNA Filamin-A | 7070 |
| Q13509_C303 | TUBB3 Tubulin beta-3 chain | 7071 |
| O60759_C210 | CYTIP Cytohesin-interacting protein | 7072 |
| Q96P65_C200 | QRFPR Pyroglutamylated RFamide | 7073 |
| | peptide receptor | |
| Q9BUF5_C303 | TUBB6 Tubulin beta-6 chain | 7074 |
| O75369_C455 | FLNB Filamin-B | 7075 |
| Q9UEY8_C245 | ADD3 Gamma-adducin | 7076 |
| P06239_C465 | LCK Tyrosine-protein kinase Lck | 7077 |
| P60953_C157 | CDC42 Cell division control protein 42 | 7078 |
| | homolog | |
| P11586_C863 | MTHFD1 C-1-tetrahydrofolate | 7079 |
| | synthase, cytoplasmic | |
| Q71U36_C347 | TUBA1A Tubulin alpha-1A chain | 7080 |
| P20073_C363 | ANXA7 Annexin A7 | 7081 |
| Q8WYJ6_C293 | SEPT1 Septin-1 | 7082 |
| P04406_C152 | GAPDH Glyceraldehyde-3-phosphate | 7083 |
| | dehydrogenase | |
| P49748_C237 | ACADVL Very long-chain specific | 7084 |
| | acyl-CoA dehydrogenase, | |
| | mitochondrial | |
| P53618_C635 | COPB1 Coatomer subunit beta | 7085 |
| Q14669_C1538 | TRIP12 E3 ubiquitin-protein ligase | 7086 |
| | TRIP12 | |
| Q8WWP7_C98 | GIMAP1 GTPase IMAP family | 7087 |
| | member 1 | |
| P49840_C262 | GSK3A Glycogen synthase kinase-3 | 7088 |
| | alpha | |
| Q9UKV3_C1223 | ACIN1 Apoptotic chromatin | 7089 |
| | condensation inducer in the nucleus | |
| Q8N5W9_C86 | FAM101B Protein FAM101B | 7090 |
| P68371_C201 | TUBB4B Tubulin beta-4B chain | 7091 |
| P68371_C211 | TUBB4B Tubulin beta-4B chain | 7092 |
| Q9BVA1_C201 | TUBB2B Tubulin beta-2B chain | 7093 |
| Q9BVA1_C211 | TUBB2B Tubulin beta-2B chain | 7094 |
| P07437_C201 | TUBB Tubulin beta chain | 7095 |
| P07437_C211 | TUBB Tubulin beta chain | 7096 |
| Q8IV04_C305 | TBC1D10C Carabin | 7097 |
| O60664_C341 | PLIN3 Perilipin-3 | 7098 |
| P53384_C277 | NUBP1 Cytosolic Fe—S cluster | 7099 |
| | assembly factor NUBP1 | |
| Q99439_C240 | CNN2 Calponin-2 | 7100 |
| P49841_C199 | GSK3B Glycogen synthase kinase-3 | 7101 |
| | beta | |
| P04406_C156 | GAPDH Glyceraldehyde-3-phosphate | 7102 |
| | dehydrogenase | |
| O95758_C55 | PTBP3 Polypyrimidine tract-binding | 7103 |
| | protein 3 | |
| Q9NY65_C347 | TUBA8 Tubulin alpha-8 chain | 7104 |
| Q13748_C347 | TUBA3D Tubulin alpha-3C/D chain | 7105 |
| Q86WN1_C449 | FCHSD1 FCH and double SH3 | 7106 |
| | domains protein 1 | |
| Q92619_C413 | HMHA1 Minor histocompatibility | 7107 |
| | protein HA-1 | |
| Q93009_C223 | USP7 Ubiquitin carboxyl-terminal | 7108 |
| | hydrolase 7 | |
| Q9BUF5_C201 | TUBB6 Tubulin beta-6 chain | 7109 |
| Q9BUF5_C211 | TUBB6 Tubulin beta-6 chain | 7110 |
| Q70J99_C136 | UNC13D Protein unc-13 homolog D | 7111 |
| O95486_C704 | SEC24A Protein transport protein | 7112 |
| | Sec24A | |
| P27987_C693 | ITPKB Inositol-trisphosphate 3-kinase | 7113 |
| | B | |
| P84103_C6 | SRSF3 Serine/arginine-rich splicing | 7114 |
| | factor 3 | |
| P24752_C126 | ACAT1 Acetyl-CoA acetyltransferase, | 7115 |
| | mitochondrial | |
| O00299_C223 | CLIC1 Chloride intracellular channel | 7116 |
| | protein 1 | |
| P68366_C376 | TUBA4A Tubulin alpha-4A chain | 7117 |
| Q71U36_C376 | TUBA1A Tubulin alpha-1A chain | 7118 |
| Q15365_C109 | PCBP1 Poly(rC)-binding protein 1 | 7119 |
| P62280_C60 | RPS11 40S ribosomal protein S11 | 7120 |
| P62829_C28 | RPL23 60S ribosomal protein L23 | 7121 |
| P05388_C119 | RPLP0 60S acidic ribosomal protein P0 | 7122 |
| P62937_C161 | PPIA Peptidyl-prolyl cis-trans | 7123 |
| | isomerase A | |
| P28062_C120 | PSMB8 Proteasome subunit beta type-8 | 7124 |
| P28062_C124 | PSMB8 Proteasome subunit beta type-8 | 7125 |
| Q9Y228_C256 | TRAF3IP3 TRAF3-interacting JNK- | 7126 |
| | activating modulator | |
| Q9BY49_C191 | PECR Peroxisomal trans-2-enoyl-CoA | 7127 |
| | reductase | |
| P30154_C306 | PPP2R1B Serine/threonine-protein | 7128 |
| | phosphatase 2A 65 kDa regulatory | |
| | subunit A beta isoform | |
| P30153_C294 | PPP2R1A Serine/threonine-protein | 7129 |
| | phosphatase 2A 65 kDa regulatory | |
| | subunit A alpha isoform | |
| P52564_C196 | MAP2K6 Dual specificity mitogen- | 7130 |
| | activated protein kinase | |
| P46734_C207 | MAP2K3 Dual specificity mitogen- | 7131 |
| | activated protein kinase | |
| Q9NYL9_C150 | TMOD3 Tropomodulin-3 | 7132 |
| O75175_C600 | CNOT3 CCR4-NOT transcription | 7133 |
| | complex subunit 3 | |
| Q9H0D6_C736 | XRN2 5-3 exoribonuclease 2 | 7134 |
| Q8IV53_C52 | DENND1C DENN domain-containing | 7135 |
| | protein 1C | |
| P26358_C1478 | DNMT1 DNA (cytosine-5)- | 7136 |
| | methyltransferase 1 | |
| Q7RTV0_C40 | PHF5A PHD finger-like domain- | 7137 |
| | containing protein 5A | |
| P51570_C182 | GALK1 Galactokinase | 7138 |
| Q9Y490_C1939 | TLN1 Talin-1 | 7139 |
| P49848_C460 | TAF6 Transcription initiation factor | 7140 |
| | TFIID subunit 6 | |
| Q9NY65_C376 | TUBA8 Tubulin alpha-8 chain | 7141 |
| Q13748_C376 | TUBA3D Tubulin alpha-3C/D chain | 7142 |
| Q9Y512_C457 | SAMM50 Sorting and assembly | 7143 |
| | machinery component 50 homolog | |
| P40939_C470 | HADHA Trifunctional enzyme subunit | 7144 |
| | alpha, mitochondrial | |
| Q6VY07_C732 | PACS1 Phosphofurin acidic cluster | 7145 |
| | sorting protein 1 | |
| Q9NWV8_C222 | BABAM1 BRISC and BRCA1-A | 7146 |
| | complex member 1 | |
| Q7KZF4_C152 | SND1 Staphylococcal nuclease | 7147 |
| | domain-containing protein | |
| P12814_C480 | ACTN1 Alpha-actinin-1 | 7148 |
| P07900_C597 | HSP90AA1 Heat shock protein HSP | 7149 |
| | 90-alpha | |
| P07900_C598 | HSP90AA1 Heat shock protein HSP | 7150 |
| | 90-alpha | |
| H0Y2S0_C31 | Uncharacterized protein | 7151 |
| Q6UB35_C906 | MTHFD1L Monofunctional C1- | 7152 |
| | tetrahydrofolate synthase, | |
| | mitochondrial | |
| Q71UM5_C77 | RPS27L 40S ribosomal protein S27- | 7153 |
| | like | |
| P42677_C77 | RPS27 40S ribosomal protein S27 | 7154 |
| Q08211_C1029 | DHX9 ATP-dependent RNA helicase A | 7155 |
| O15533_C115 | TAPBP Tapasin | 7156 |
| P29590_C389 | PML Protein PML | 7157 |
| P62937_C62 | PPIA Peptidyl-prolyl cis-trans | 7158 |
| | isomerase A | |
| Q14204_C1999 | DYNC1H1 Cytoplasmic dynein 1 | 7159 |
| | heavy chain 1 | |
| Q13561_C240 | DCTN2 Dynactin subunit 2 | 7160 |
| Q13561_C256 | DCTN2 Dynactin subunit 2 | 7161 |
| H3BQZ7_C602 | Uncharacterized protein | 7162 |
| Q1KMD3_C602 | HNRNPUL2 Heterogeneous nuclear | 7163 |
| | ribonucleoprotein U-like protein 2 | |
| P61247_C96 | RPS3A 40S ribosomal protein S3a | 7164 |
| P68871_C94 | HBB Hemoglobin subunit beta | 7165 |
| Q9UHD8_C375 | SEPT9 Septin-9 | 7166 |
| Q8NFW8_C394 | CMAS N-acylneuraminate | 7167 |
| | cytidylyltransferase | |
| P51878_C315 | CASP5 Caspase-5 | 7168 |
| P49662_C258 | CASP4 Caspase-4 | 7169 |
| O75083_C170 | WDR1 WD repeat-containing protein 1 | 7170 |
| P55884_C515 | EIF3B Eukaryotic translation initiation | 7171 |
| | factor 3 subunit | |
| Q9UKX7_C181 | NUP50 Nuclear pore complex protein | 7172 |
| | Nup50 | |
| Q13185_C69 | CBX3 Chromobox protein homolog 3 | 7173 |
| O00299_C59 | CLIC1 Chloride intracellular channel | 7174 |
| | protein 1 | |
| Q06587_C69 | RING1 E3 ubiquitin-protein ligase | 7175 |
| | RING1 | |
| Q14204_C3033 | DYNC1H1 Cytoplasmic dynein 1 | 7176 |
| | heavy chain 1 | |
| Q13045_C241 | FLII Protein flightless-1 homolog | 7177 |
| P48643_C181 | CCT5 T-complex protein 1 subunit | 7178 |
| | epsilon | |
| Q04726_C528 | TLE3 Transducin-like enhancer protein | 7179 |
| | 3 | |
| Q15149_C3493 | PLEC Plectin | 7180 |
| O00299_C24 | CLIC1 Chloride intracellular channel | 7181 |
| | protein 1 | |
| P35579_C694 | MYH9 Myosin-9 | 7182 |
| Q9Y490_C732 | TLN1 Talin-1 | 7183 |
| Q8WWP7_C66 | GIMAP1 GTPase IMAP family | 7184 |
| | member 1 | |
| P49721_C91 | PSMB2 Proteasome subunit beta type-2 | 7185 |
| P52272_C653 | HNRNPM Heterogeneous nuclear | 7186 |
| | ribonucleoprotein M | |
| Q9UK45_C85 | LSM7 U6 snRNA-associated Sm-like | 7187 |
| | protein LSm7 | |
| P21333_C2199 | FLNA Filamin-A | 7188 |
| P22087_C268 | FBL rRNA 2-O-methyltransferase | 7189 |
| | fibrillarin | |
| Q99714_C214 | HSD17B10 3-hydroxyacyl-CoA | 7190 |
| | dehydrogenase type-2 | |
| Q96F86_C413 | EDC3 Enhancer of mRNA-decapping | 7191 |
| | protein 3 | |
| P53621_C975 | COPA Coatomer subunit alpha | 7192 |
| Q96S55_C272 | WRNIP1 ATPase WRNIP1 | 7193 |
| P15498_C652 | VAV1 Proto-oncogene vav | 7194 |
| P53621_C453 | COPA Coatomer subunit alpha | 7195 |
| Q96RU3_C248 | FNBP1 Formin-binding protein 1 | 7196 |
| Q13148_C39 | TARDBP TAR DNA-binding protein | 7197 |
| | 43 | |
| Q9NYL9_C132 | TMOD3 Tropomodulin-3 | 7198 |
| Q5VWZ2_C12 | LYPLAL1 Lysophospholipase-like | 7199 |
| | protein 1 | |
| Q7Z5K2_C1170 | WAPAL Wings apart-like protein | 7200 |
| | homolog | |
| Q13148_C244 | TARDBP TAR DNA-binding protein | 7201 |
| | 43 | |
| Q13200_C779 | PSMD2 26S proteasome non-ATPase | 7202 |
| | regulatory subunit 2 | |
| Q99460_C806 | PSMD1 26S proteasome non-ATPase | 7203 |
| | regulatory subunit 1 | |
| P29466_C397 | CASP1 Caspase-1 | 7204 |
| P63279_C138 | UBE2I SUMO-conjugating enzyme | 7205 |
| | UBC9 | |
| Q92608_C1408 | DOCK2 Dedicator of cytokinesis | 7206 |
| | protein 2 | |
| Q9H6A0_C104 | DENND2D DENN domain-containing | 7207 |
| | protein 2D | |
| Q96F86_C410 | EDC3 Enhancer of mRNA-decapping | 7208 |
| | protein 3 | |
| Q12824_C147 | SMARCB1 SWI/SNF-related matrix- | 7209 |
| | associated actin-dependent | |
| O75427_C134 | LRCH4 Leucine-rich repeat and | 7210 |
| | calponin homology domain-containing | |
| | protein 4 | |
| Q08211_C438 | DHX9 ATP-dependent RNA helicase A | 7211 |
| P11387_C630 | TOP1 DNA topoisomerase 1 | 7212 |
| A6NHR9_C985 | SMCHD1 Structural maintenance of | 7213 |
| | chromosomes flexible hinge domain | |
| | containing 1 | |
| P62195_C112 | PSMC5 26S protease regulatory | 7214 |
| | subunit 8 | |
| O43772_C58 | SLC25A20 Mitochondrial | 7215 |
| | carnitine/acylcarnitine carrier protein | |
| Q71U36_C20 | TUBA1A Tubulin alpha-1A chain | 7216 |
| Q15149_C3008 | PLEC Plectin | 7217 |
| O75427_C224 | LRCH4 Leucine-rich repeat and | 7218 |
| | calponin homology domain-containing | |
| | protein 4 | |
| Q8N201_C1633 | INTS1 Integrator complex subunit 1 | 7219 |
| Q71U36_C25 | TUBA1A Tubulin alpha-1A chain | 7220 |
| P07195_C164 | LDHB L-lactate dehydrogenase B | 7221 |
| | chain | |
| P00338_C163 | LDHA L-lactate dehydrogenase A | 7222 |
| | chain | |
| P21333_C1912 | FLNA Filamin-A | 7223 |
| P21333_C1920 | FLNA Filamin-A | 7224 |
| P00558_C379 | PGK1 Phosphoglycerate kinase 1 | 7225 |
| P19447_C342 | ERCC3 TFIIH basal transcription | 7226 |
| | factor complex helicase | |
| P10809_C447 | HSPD1 60 kDa heat shock protein, | 7227 |
| | mitochondrial | |
| P54198_C882 | HIRA Protein HIRA | 7228 |
| P15153_C157 | RAC2 Ras-related C3 botulinum toxin | 7229 |
| | substrate 2 | |
| P53618_C623 | COPB1 Coatomer subunit beta | 7230 |
| P07864_C163 | LDHC L-lactate dehydrogenase C | 7231 |
| | chain | |
| Q6ZMR3_C163 | LDHAL6A L-lactate dehydrogenase A- | 7232 |
| | like 6A | |
| P12268_C140 | IMPDH2 Inosine-5-monophosphate | 7233 |
| | dehydrogenase 2 | |
| Q69YN4_C353 | KIAA1429 Protein virilizer homolog | 7234 |
| P00558_C380 | PGK1 Phosphoglycerate kinase 1 | 7235 |
| P15121_C299 | AKR1B1 Aldose reductase | 7236 |
| Q92888_C892 | ARHGEF1 Rho guanine nucleotide | 7237 |
| | exchange factor 1 | |
| Q9BVQ7_C309 | SPATA5L1 Spermatogenesis- | 7238 |
| | associated protein 5-like protein | |
| Q15149_C3110 | PLEC Plectin | 7239 |
| P17655_C82 | CAPN2 Calpain-2 catalytic subunit | 7240 |
| P50416_C304 | CPT1A Carnitine O- | 7241 |
| | palmitoyltransferase 1, liver isoform | |
| Q92947_C289 | GCDH Glutaryl-CoA dehydrogenase, | 7242 |
| | mitochondrial | |
| P60763_C157 | RAC3 Ras-related C3 botulinum toxin | 7243 |
| | substrate 3 | |
| P63000_C157 | RAC1 Ras-related C3 botulinum toxin | 7244 |
| | substrate 1 | |
| Q14141_C269 | SEPT6 Septin-6 | 7245 |
| Q6IBS0_C141 | TWF2 Twinfilin-2 | 7246 |
| P46736_C273 | BRCC3 Lys-63-specific deubiquitinase | 7247 |
| | BRCC36 | |
| O14641_C354 | DVL2 Segment polarity protein | 7248 |
| | dishevelled homolog DVL-2 | |
| Q13423_C936 | NNT NAD(P) transhydrogenase, | 7249 |
| | mitochondrial | |
| Q15027_C320 | ACAP1 Arf-GAP with coiled-coil, | 7250 |
| | ANK repeat and PH domain 1 | |
| P22059_C224 | OSBP Oxysterol-binding protein 1 | 7251 |
| Q08945_C139 | SSRP1 FACT complex subunit SSRP1 | 7252 |
| P00558_C367 | PGK1 Phosphoglycerate kinase 1 | 7253 |
| P68366_C305 | TUBA4A Tubulin alpha-4A chain | 7254 |
| Q71U36_C305 | TUBA1A Tubulin alpha-1A chain | 7255 |
| P21333_C574 | FLNA Filamin-A | 7256 |
| Q86XP3_C281 | DDX42 ATP-dependent RNA helicase | 7257 |
| | DDX42 | |
| Q9UL46_C91 | PSME2 Proteasome activator complex | 7258 |
| | subunit 2 | |
| Q92598_C34 | HSPH1 Heat shock protein 105 kDa | 7259 |
| Q16186_C88 | ADRM1 Proteasomal ubiquitin | 7260 |
| | receptor ADRM1 | |
| P21333_C478 | FLNA Filamin-A | 7261 |
| P21333_C483 | FLNA Filamin-A | 7262 |
| P40926_C212 | MDH2 Malate dehydrogenase, | 7263 |
| | mitochondrial | |
| P47756_C36 | CAPZB F-actin-capping protein | 7264 |
| | subunit beta | |
| P12270_C1068 | TPR Nucleoprotein TPR | 7265 |
| O43707_C499 | ACTN4 Alpha-actinin-4 | 7266 |
| Q5VSL9_C798 | FAM40A Protein FAM40A | 7267 |
| P19367_C834 | HK1 Hexokinase-1 | 7268 |
| Q8N9T8_C673 | KRI1 Protein KRI1 homolog | 7269 |
| P68371_C239 | TUBB4B Tubulin beta-4B chain | 7270 |
| Q9BVA1_C239 | TUBB2B Tubulin beta-2B chain | 7271 |
| P07437_C239 | TUBB Tubulin beta chain | 7272 |
| P35579_C896 | MYH9 Myosin-9 | 7273 |
| Q9Y2H1_C235 | STK38L Serine/threonine-protein | 7274 |
| | kinase 38-like | |
| Q15208_C234 | STK38 Serine/threonine-protein kinase | 7275 |
| | 38 | |
| Q9UNM6_C357 | PSMD13 26S proteasome non-ATPase | 7276 |
| | regulatory subunit 13 | |
| Q8N8A2_C921 | ANKRD44 Serine/threonine-protein | 7277 |
| | phosphatase 6 regulatory | |
| Q14669_C1959 | TRIP12 E3 ubiquitin-protein ligase | 7278 |
| | TRIP12 | |
| Q8IV53_C21 | DENND1C DENN domain-containing | 7279 |
| | protein 1C | |
| Q86X10_C327 | RALGAPB Ral GTPase-activating | 7280 |
| | protein subunit beta | |
| P0CB43_C368 | FAM203B Protein FAM203B | 7281 |
| Q9Y490_C1434 | TLN1 Talin-1 | 7282 |
| O00499_C47 | BIN1 Myc box-dependent-interacting | 7283 |
| | protein 1 | |
| O15067_C66 | PFAS | 7284 |
| | Phosphoribosylfonnylglycinamidine | |
| | synthase | |
| Q01082_C112 | SPTBN1 Spectrin beta chain, non- | 7285 |
| | erythrocytic 1 | |
| Q92793_C1219 | CREBBP CREB-binding protein | 7286 |
| Q09472_C1183 | EP300 Histone acetyltransferase p300 | 7287 |
| Q16181_C126 | SEPT7 Septin-7 | 7288 |
| Q14289_C972 | PTK2B Protein-tyrosine kinase 2-beta | 7289 |
| Q9H3P2_C131 | WHSC2 Negative elongation factor A | 7290 |
| Q9H3P2_C141 | WHSC2 Negative elongation factor A | 7291 |
| Q92570_C397 | NR4A3 Nuclear receptor subfamily 4 | 7292 |
| | group A member 3 | |
| Q14204_C633 | DYNC1H1 Cytoplasmic dynein 1 | 7293 |
| | heavy chain 1 | |
| P15880_C229 | RPS2 40S ribosomal protein S2 | 7294 |
| Q12906_C278 | ILF3 Interleukin enhancer-binding | 7295 |
| | factor 3 | |
| Q12906_C295 | ILF3 Interleukin enhancer-binding | 7296 |
| | factor 3 | |
| P27348_C237 | YWHAQ 14-3-3 protein theta | 7297 |
| Q9UHD8_C531 | SEPT9 Septin-9 | 7298 |
| P16152_C227 | CBR1 Carbonyl reductase | 7299 |
| P05455_C245 | SSB Lupus La protein | 7300 |
| P50995_C294 | ANXA11 Annexin A11 | 7301 |
| P42765_C382 | ACAA2 3-ketoacyl-CoA thiolase, | 7302 |
| | mitochondrial | |
| Q06323_C101 | PSME1 Proteasome activator complex | 7303 |
| | subunit 1 | |
| Q06323_C106 | PSME1 Proteasome activator complex | 7304 |
| | subunit 1 | |
| P68036_C86 | UBE2L3 Ubiquitin-conjugating | 7305 |
| | enzyme E2 L3 | |
| Q9P0J1_C151 | PDP1 | 7306 |
| Q92973_C285 | TNPO1 Transportin-1 | 7307 |
| Q86UX7_C128 | FERMT3 Fermitin family homolog 3 | 7308 |
| Q9Y5T5_C205 | USP16 Ubiquitin carboxyl-terminal | 7309 |
| | hydrolase 16 | |
| Q15149_C4071 | PLEC Plectin | 7310 |
| Q9NP80_C714 | PNPLA8 Calcium-independent | 7311 |
| | phospholipase A2-gamma | |
| P13796_C140 | LCP1 Plastin-2 | 7312 |
| O14647_C365 | CHD2 Chromodomain-helicase-DNA- | 7313 |
| | binding protein 2 | |
| Q92973_C297 | TNPO1 Transportin-1 | 7314 |
| P13489_C95 | RNH1 Ribonuclease inhibitor | 7315 |
| P13489_C96 | RNH1 Ribonuclease inhibitor | 7316 |
| Q9HC35_C820 | EML4 Echinoderm microtubule- | 7317 |
| | associated protein-like 4 | |
| P08107_C603 | HSPA1B Heat shock 70 kDa protein | 7318 |
| | 1A/1B | |
| P30510_C345 | HLA-C HLA class I histocompatibility | 7319 |
| | antigen, Cw-14 alph | |
| Q29865_C345 | HLA-C HLA class I histocompatibility | 7320 |
| | antigen, Cw-18 alph | |
| P30504_C345 | HLA-C HLA class I histocompatibility | 7321 |
| | antigen, Cw-4 alpha | |
| Q00653_C432 | NFKB2 Nuclear factor NF-kappa-B | 7322 |
| | p100 subunit | |
| Q96GX9_C16 | APIP Probable methylthioribulose-1- | 7323 |
| | phosphate dehydratase | |
| P16152_C226 | CBR1 Carbonyl reductase | 7324 |
| P13797_C143 | PLS3 Plastin-3 | 7325 |
| Q9TNN7_C345 | HLA-C HLA class I histocompatibility | 7326 |
| | antigen, Cw-5 alpha | |
| Q29963_C345 | HLA-C HLA class I histocompatibility | 7327 |
| | antigen, Cw-6 alpha | |
| Q29960_C345 | HLA-C HLA class I histocompatibility | 7328 |
| | antigen, Cw-16 alpha | |
| Q07000_C345 | HLA-C HLA class I histocompatibility | 7329 |
| | antigen, Cw-15 alpha | |
| P14678_C19 | SNRPB Small nuclear | 7330 |
| | ribonucleoprotein-associated protein | |
| P63162_C19 | SNRPN Small nuclear | 7331 |
| | ribonucleoprotein-associated protein | |
| O14950_C109 | MYL12B Myosin regulatory light chain | 7332 |
| | 12B | |
| P14618_C358 | PKM Pyruvate kinase isozymes M1/M2 | 7333 |
| O14733_C131 | MAP2K7 Dual specificity mitogen- | 7334 |
| | activated protein kinase | |
| P62701_C41 | RPS4X 40S ribosomal protein S4, X | 7335 |
| | isoform | |
| P60709_C257 | ACTB Actin, cytoplasmic 1 | 7336 |
| P60709_C272 | ACTB Actin, cytoplasmic 1 | 7337 |
| Q8N7H5_C36 | PAF1 RNA polymerase II-associated | 7338 |
| | factor 1 homolog | |
| Q9UBB5_C359 | MBD2 Methyl-CpG-binding domain | 7339 |
| | protein 2 | |
| P21964_C223 | COMT Catechol O-methyltransferase | 7340 |
| Q9BVQ7_C509 | SPATA5L1 Spermatogenesis- | 7341 |
| | associated protein 5-like protein | |
| P61247_C201 | RPS3A 40S ribosomal protein S3a | 7342 |
| Q9Y3D5_C90 | MRPS18C 28S ribosomal protein S18c, | 7343 |
| | mitochondrial | |
| P48735_C308 | IDH2 Isocitrate dehydrogenase | 7344 |
| P84243_C111 | H3F3B Histone H3.3 | 7345 |
| P37198_C475 | NUP62 Nuclear pore glycoprotein p62 | 7346 |
| P61158_C307 | ACTR3 Actin-related protein 3 | 7347 |
| P35754_C23 | GLRX Glutaredoxin-1 | 7348 |
| Q9Y5B9_C574 | SUPT16H FACT complex subunit | 7349 |
| | SPT16 | |
| P22102_C237 | GART Trifunctional purine | 7350 |
| | biosynthetic protein adenosine | |
| Q01780_C612 | EXOSC10 Exosome component 10 | 7351 |
| Q7Z5K2_C293 | WAPAL Wings apart-like protein | 7352 |
| | homolog | |
| P39687_C87 | ANP32A Acidic leucine-rich nuclear | 7353 |
| | phosphoprotein 32 family member A | |
| P49588_C947 | AARS Alanine--tRNA ligase, | 7354 |
| | cytoplasmic | |
| Q9GZR2_C382 | REXO4 RNA exonuclease 4 | 7355 |
| H3BQZ7_C408 | Uncharacterized protein | 7356 |
| Q1KMD3_C408 | HNRNPUL2 Heterogeneous nuclear | 7357 |
| | ribonucleoprotein U-like protein 2 | |
| Q00325_C237 | SLC25A3 Phosphate carrier protein, | 7358 |
| | mitochondrial | |
| Q8TEM1_C767 | NUP210 Nuclear pore membrane | 7359 |
| | glycoprotein 210 | |
| P62753_C12 | RPS6 40S ribosomal protein S6 | 7360 |
| O95487_C562 | SEC24B Protein transport protein | 7361 |
| | Sec24B | |
| P17844_C200 | DDX5 Probable ATP-dependent RNA | 7362 |
| | helicase DDX5 | |
| Q92841_C277 | DDX17 Probable ATP-dependent RNA | 7363 |
| | helicase DDX17 | |
| O75533_C1035 | SF3B1 Splicing factor 3B subunit 1 | 7364 |
| P62280_C131 | RPS11 40S ribosomal protein S11 | 7365 |
| Q9Y3L3_C102 | SH3BP1 SH3 domain-binding protein 1 | 7366 |
| Q13148_C50 | TARDBP TAR DNA-binding protein | 7367 |
| | 43 | |
| P14649_C89 | MYL6B Myosin light chain 6B | 7368 |
| P60660_C32 | MYL6 Myosin light polypeptide 6 | 7369 |
| P62910_C91 | RPL32 60S ribosomal protein L32 | 7370 |
| P21333_C1157 | FLNA Filamin-A | 7371 |
| Q9BWD1_C88 | ACAT2 Acetyl-CoA acetyltransferase, | 7372 |
| | cytosolic | |
| Q9BWD1_C92 | ACAT2 Acetyl-CoA acetyltransferase, | 7373 |
| | cytosolic | |
| Q8WWP7_C181 | GIMAP1 GTPase IMAP family | 7374 |
| | member 1 | |
| P05386_C61 | RPLP1 60S acidic ribosomal protein P1 | 7375 |
| P07900_C374 | HSP90AA1 Heat shock protein HSP | 7376 |
| | 90-alpha | |
| O75694_C974 | NUP155 Nuclear pore complex protein | 7377 |
| | Nup155 | |
| Q9NZ32_C388 | ACTR10 Actin-related protein 10 | 7378 |
| P14618_C326 | PKM Pyruvate kinase isozymes M1/M2 | 7379 |
| Q9BZL6_C217 | PRKD2 Serine/threonine-protein kinase | 7380 |
| | D2 | |
| Q9Y490_C709 | TLN1 Talin-1 | 7381 |
| Q9Y490_C719 | TLN1 Talin-1 | 7382 |
| A6NHR9_C505 | SMCHD1 Structural maintenance of | 7383 |
| | chromosomes flexible hinge domain- | |
| | containing protein 1 | |
| P18669_C153 | PGAM1 Phosphoglycerate mutase 1 | 7384 |
| Q99973_C149 | TEP1 Telomerase protein component 1 | 7385 |
| P31150_C202 | GDI1 Rab GDP dissociation inhibitor | 7386 |
| | alpha | |
| Q96S15_C474 | WDR24 WD repeat-containing protein | 7387 |
| | 24 | |
| A0FGR8_C611 | ESYT2 Extended synaptotagmin-2 | 7388 |
| P49792_C348 | RANBP2 E3 SUMO-protein ligase | 7389 |
| | RanBP2 | |
| Q9Y6C9_C79 | MTCH2 Mitochondrial carrier homolog | 7390 |
| | 2 | |
| Q9Y3L3_C388 | SH3BP1 SH3 domain-binding protein 1 | 7391 |
| P47755_C111 | CAPZA2 F-actin-capping protein | 7392 |
| | subunit alpha-2 | |
| Q86W42_C314 | THOC6 THO complex subunit 6 | 7393 |
| | homolog | |
| P38646_C317 | HSPA9 Stress-70 protein, | 7394 |
| | mitochondrial | |
| Q9U1D3_C190 | VPS51 Vacuolar protein sorting- | 7395 |
| | associated protein 51 homolog | |
| Q9Y2Q3_C176 | GSTK1 Glutathione S-transferase | 7396 |
| | kappa 1 | |
| Q86XR8_C285 | CEP57 Centrosomal protein of 57 kDa | 7397 |
| P21281_C162 | ATP6V1B2 V-type proton ATPase | 7398 |
| | subunit B, brain isoform | |
| Q86UV5_C39 | USP48 Ubiquitin carboxyl-terminal | 7399 |
| | hydrolase 48 | |
| P35579_C671 | MYH9 Myosin-9 | 7400 |
| P10809_C237 | HSPD1 60 kDa heat shock protein, | 7401 |
| | mitochondrial | |
| P35611_C68 | ADD1 Alpha-adducin | 7402 |
| Q9H4M9_C138 | EHD1 EH domain-containing protein 1 | 7403 |
| O60828_C60 | PQBP1 Polyglutamine-binding protein | 7404 |
| | 1 | |
| Q9P289_C392 | MST4 Serine/threonine-protein kinase | 7405 |
| | MST4 | |
| P28838_C376 | LAP3 Cytosol aminopeptidase | 7406 |
| P55265_C851 | ADAR Double-stranded RNA-specific | 7407 |
| | adenosine deaminase | |
| Q8WXH0_C39 | SYNE2 Nesprin-2 | 7408 |
| P50991_C252 | CCT4 T-complex protein 1 subunit | 7409 |
| | delta | |
| Q8NDH3_C189 | NPEPL1 Probable aminopeptidase | 7410 |
| | NPEPL1 | |
| P49023_C290 | PXN Paxillin | 7411 |
| Q9Y508_C8 | RNF114 RING finger protein 114 | 7412 |
| P13667_C555 | PDIA4 Protein disulfide-isomerase A4 | 7413 |
| P30101_C406 | PDIA3 Protein disulfide-isomerase A3 | 7414 |
| P15153_C6 | RAC2 Ras-related C3 botulinum toxin | 7415 |
| | substrate 2 | |
| Q29RF7_C583 | PDS5A Sister chromatid cohesion | 7416 |
| | protein PDS5 homolog A | |
| Q00839_C408 | HNRNPU Heterogeneous nuclear | 7417 |
| | ribonucleoprotein U | |
| P13667_C558 | PDIA4 Protein disulfide-isomerase A4 | 7418 |
| P30101_C409 | PDIA3 Protein disulfide-isomerase A3 | 7419 |
| Q9Y4H4_C160 | GPSM3 G-protein-signaling modulator | 7420 |
| | 3 | |
| P60763_C6 | RAC3 Ras-related C3 botulinum toxin | 7421 |
| | substrate 3 | |
| P63000_C6 | RAC1 Ras-related C3 botulinum toxin | 7422 |
| | substrate 1 | |
| O95232_C40 | LUC7L3 Luc7-like protein 3 | 7423 |
| P60953_C6 | CDC42 Cell division control protein 42 | 7424 |
| | homolog | |
| P61158_C34 | ACTR3 Actin-related protein 3 | 7425 |
| Q9P2A4_C137 | ABI3 ABI gene family member 3 | 7426 |
| P16333_C266 | NCK1 Cytoplasmic protein NCK1 | 7427 |
| P49591_C438 | SARS Serine--tRNA ligase, | 7428 |
| | cytoplasmic | |
| Q9BQC3_C251 | DPH2 Diphthamide biosynthesis | 7429 |
| | protein 2 | |
| Q99439_C61 | CNN2 Calponin-2 | 7430 |
| Q07020_C134 | RPL18 60S ribosomal protein L18 | 7431 |
| P57772_C442 | EEFSEC Selenocysteine-specific | 7432 |
| | elongation factor | |
| Q92797_C848 | SYMPK Symplekin | 7433 |
| Q8WUM4_C250 | PDCD6IP Programmed cell death 6- | 7434 |
| | interacting protein | |
| P04075_C73 | ALDOA Fructose-bisphosphate | 7435 |
| | aldolase A | |
| P31146_C51 | CORO1A Coronin-1A | 7436 |
| P31146_C24 | CORO1A Coronin-1A | 7437 |
| Q9NXE8_C107 | CWC25 Pre-mRNA-splicing factor | 7438 |
| | CWC25 homolog | |
| Q01813_C360 | PFKP 6-phosphofructokinase type C | 7439 |
| Q92878_C1302 | RAD50 DNA repair protein RAD50 | 7440 |
| P62241_C174 | RPS8 40S ribosomal protein S8 | 7441 |
| Q9BQC3_C250 | DPH2 Diphthamide biosynthesis | 7442 |
| | protein 2 | |
| Q14166_C612 | TTLL12 Tubulin--tyrosine ligase-like | 7443 |
| | protein 12 | |
| P62241_C72 | RPS8 40S ribosomal protein S8 | 7444 |
| P28062_C160 | PSMB8 Proteasome subunit beta type-8 | 7445 |
| P51649_C340 | ALDH5A1 Succinate-semialdehyde | 7446 |
| | dehydrogenase, mitochondrial | |
| Q8WYJ6_C99 | SEPT1 Septin-1 | 7447 |
| Q8WYJ6_C102 | SEPT1 Septin-1 | 7448 |
| Q15027_C64 | ACAP1 Arf-GAP with coiled-coil, | 7449 |
| | ANK repeat and PH domain 1 | |
| Q15366_C54 | PCBP2 Poly(rC)-binding protein 2 | 7450 |
| Q15365_C54 | PCBP1 Poly(rC)-binding protein 1 | 7451 |
| P35236_C204 | PTPN7 Tyrosine-protein phosphatase | 7452 |
| | non-receptor type 7 | |
| P47756_C147 | CAPZB F-actin-capping protein | 7453 |
| | subunit beta | |
| A6NHR9_C444 | SMCHD1 Structural maintenance of | 7454 |
| | chromosomes flexible hinge domain- | |
| | containing protein 1 | |
| Q5TDH0_C361 | DDI2 Protein DDI1 homolog 2 | 7455 |
| P62266_C90 | RPS23 40S ribosomal protein S23 | 7456 |
| P29590_C204 | PML Protein PML | 7457 |
| P42226_C228 | STAT6 Signal transducer and activator | 7458 |
| | of transcription 6 | |
| Q9H1E5_C326 | TMX4 Thioredoxin-related | 7459 |
| | transmembrane protein 4 | |
| P62241_C71 | RPS8 40S ribosomal protein S8 | 7460 |
| Q9UBW5_C205 | BIN2 Bridging integrator 2 | 7461 |
| P41214_C489 | EIF2D Eukaryotic translation initiation | 7462 |
| | factor 2D | |
| Q96I99_C255 | SUCLG2 Succinyl-CoA ligase | 7463 |
| P63208_C160 | SKP1 S-phase kinase-associated | 7464 |
| | protein 1 | |
| P61163_C34 | ACTR1A Alpha-centractin | 7465 |
| P42025_C34 | ACTR1B Beta-centractin | 7466 |
| O15381_C626 | NVL Nuclear valosin-containing | 7467 |
| | protein-like | |
| Q9NTX5_C133 | ECHDC1 Ethylmalonyl-CoA | 7468 |
| | decarboxylase | |
| O43390_C292 | HNRNPR Heterogeneous nuclear | 7469 |
| | ribonucleoprotein R | |
| O60506_C289 | SYNCRIP Heterogeneous nuclear | 7470 |
| | ribonucleoprotein Q | |
| Q2M2I8_C156 | AAK1 AP2-associated protein kinase 1 | 7471 |
| P62917_C115 | RPL8 60S ribosomal protein L8 | 7472 |
| O60610_C314 | DIAPH1 Protein diaphanous homolog 1 | 7473 |
| P12081_C455 | HARS Histidine--tRNA ligase, | 7474 |
| | cytoplasmic | |
| P62917_C114 | RPL8 60S ribosomal protein L8 | 7475 |
| P23528_C147 | CFL1 Cofilin-1 | 7476 |
| P49189_C288 | ALDH9A1 4- | 7477 |
| | trimethylaminobutyraldehyde | |
| | dehydrogenase | |
| P49189_C289 | ALDH9A1 4- | 7478 |
| | trimethylaminobutyraldehyde | |
| | dehydrogenase | |
| Q8N0W3_C582 | FUK L-fucose kinase | 7479 |
| Q14137_C404 | BOP1 Ribosome biogenesis protein | 7480 |
| | BOP1 | |
| Q9Y4K1_C1404 | AIM1 Absent in melanoma 1 protein | 7481 |
| P19367_C813 | HK1 Hexokinase-1 | 7482 |
| P60174_C79 | TPI1 Triosephosphate isomerase | 7483 |
| Q9H307_C249 | PNN Pinin | 7484 |
| Q9UKA8_C239 | RCAN3 Calcipressin-3 | 7485 |
| O00160_C101 | MYO1F Unconventional myosin-If | 7486 |
| P07355_C133 | ANXA2 Annexin A2 | 7487 |
| P07814_C1148 | EPRS Bifunctional glutamate/proline-- | 7488 |
| | tRNA ligase | |
| P52907_C157 | CAPZA1 F-actin-capping protein | 7489 |
| | subunit alpha-1 | |
| P62837_C111 | UBE2D2 Ubiquitin-conjugating | 7490 |
| | enzyme E2 D2 | |
| P61077_C111 | UBE2D3 Ubiquitin-conjugating | 7491 |
| | enzyme E2 D3 | |
| Q8NE71_C365 | ABCF1 ATP-binding cassette sub- | 7492 |
| | family F member 1 | |
| Q8NBU5_C359 | ATAD1 ATPase family AAA domain- | 7493 |
| | containing protein 1 | |
| P55265_C630 | ADAR Double-stranded RNA-specific | 7494 |
| | adenosine deaminase | |
| Q9Y3Z3_C51 | SAMHD1 SAM domain and HD | 7495 |
| | domain-containing protein 1 | |
| P29728_C668 | OAS2 2-5-oligoadenylate synthase 2 | 7496 |
| O43823_C85 | AKAP8 A-kinase anchor protein 8 | 7497 |
| P51610_C135 | HCFC1 Host cell factor 1 | 7498 |
| P20592_C100 | MX2 Interferon-induced GTP-binding | 7499 |
| | protein Mx2 | |
| Q96N96_C124 | SPATA13 Spermatogenesis-associated | 7500 |
| | protein 13 | |
| Q01826_C209 | SATB1 DNA-binding protein SATB1 | 7501 |
| I3L1I5_C86 | Uncharacterized protein | 7502 |
| P62837_C107 | UBE2D2 Ubiquitin-conjugating | 7503 |
| | enzyme E2 D2 | |
| P61077_C107 | UBE2D3 Ubiquitin-conjugating | 7504 |
| | enzyme E2 D3 | |
| P20591_C52 | MX1 Interferon-induced GTP-binding | 7505 |
| | protein Mx1 | |
| Q9Y490_C1023 | TLN1 Talin-1 | 7506 |
| Q99973_C1468 | TEP1 Telomerase protein component 1 | 7507 |
| Q8IY67_C297 | RAVER1 Ribonucleoprotein PTB- | 7508 |
| | binding 1 | |
| Q8WUM4_C512 | PDCD6IP Programmed cell death 6- | 7509 |
| | interacting protein | |
| Q14141_C14 | SEPT6 Septin-6 | 7510 |
| O15213_C172 | WDR46 WD repeat-containing protein | 7511 |
| | 46 | |
| B0I1T2_C143 | MYO1G Unconventional myosin-Ig | 7512 |
| P14868_C349 | DARS Aspartate--tRNA ligase, | 7513 |
| | cytoplasmic | |
| P40227_C406 | CCT6A T-complex protein 1 subunit | 7514 |
| | zeta | |
| Q29RF7_C327 | PDS5A Sister chromatid cohesion | 7515 |
| | protein PDS5 homolog A | |
| Q8NF50_C170 | DOCK8 Dedicator of cytokinesis | 7516 |
| | protein 8 | |
| Q14683_C1115 | SMC1A Structural maintenance of | 7517 |
| | chromosomes protein 1A | |
| O14773_C522 | TPP1 Tripeptidyl-peptidase 1 | 7518 |
| O14773_C526 | TPP1 Tripeptidyl-peptidase 1 | 7519 |
| O14773_C537 | TPP1 Tripeptidyl-peptidase 1 | 7520 |
| Q9NTI5_C317 | PDS5B Sister chromatid cohesion | 7521 |
| | protein PDS5 homolog B | |
| Q9NVP1_C183 | DDX18 ATP-dependent RNA helicase | 7522 |
| | DDX18 | |
| Q9Y490_C1506 | TLN1 Talin-1 | 7523 |
| P13796_C164 | LCP1 Plastin-2 | 7524 |
| Q5EBM0_C287 | CMPK2 UMP-CMP kinase 2, | 7525 |
| | mitochondrial | |
| Q08AF3_C875 | SLFN5 Schlafen family member 5 | 7526 |
| Q9NUV9_C220 | GIMAP4 GTPase IMAP family | 7527 |
| | member 4 | |
| P08238_C589 | HSP90AB1 Heat shock protein HSP | 7528 |
| | 90-beta | |
| P08238_C590 | HSP90AB1 Heat shock protein HSP | 7529 |
| | 90-beta | |
| P60866_C70 | RPS20 40S ribosomal protein S20 | 7530 |
| Q08J23_C673 | NSUN2 tRNA (cytosine(34)-C(5))- | 7531 |
| | methyltransferase | |
| Q9H4E7_C253 | DEF6 Differentially expressed in FDCP | 7532 |
| | 6 homolog | |
| Q15365_C194 | PCBP 1 Poly(rC)-binding protein 1 | 7533 |
| P30041_C47 | PRDX6 Peroxiredoxin-6 | 7534 |
| P78371_C395 | CCT2 T-complex protein 1 subunit beta | 7535 |
| P46782_C155 | RPS5 40S ribosomal protein S5 | 7536 |
| Q96GM5_C492 | SMARCD1 SWI/SNF-related matrix- | 7537 |
| | associated actin-dependent | |
| P10599_C73 | TXN Thioredoxin | 7538 |
| Q14258_C70 | TRIM25 E3 ubiquitin/ISG15 ligase | 7539 |
| | TRIM25 | |
| Q96RN5_C618 | MED15 Mediator of RNA polymerase | 7540 |
| | II transcription subuni | |
| P45973_C133 | CBX5 Chromobox protein homolog 5 | 7541 |
| Q9UHD8_C248 | SEPT9 Septin-9 | 7542 |
| P39023_C336 | RPL3 60S ribosomal protein L3 | 7543 |
| O14980_C164 | XPO1 Exportin-1 | 7544 |
| Q08J23_C678 | NSUN2 tRNA (cytosine(34)-C(5))- | 7545 |
| | methyltransferase | |
| Q00839_C562 | HNRNPU Heterogeneous nuclear | 7546 |
| | ribonucleoprotein U | |
| Q9BVA1_C127 | TUBB2B Tubulin beta-2B chain | 7547 |
| Q9BVA1_C129 | TUBB2B Tubulin beta-2B chain | 7548 |
| P10599_C32 | TXN Thioredoxin | 7549 |
| Q14289_C677 | PTK2B Protein-tyrosine kinase 2-beta | 7550 |
| Q9H4E7_C244 | DEF6 Differentially expressed in FDCP | 7551 |
| | 6 homolog | |
| P15311_C117 | EZR Ezrin | 7552 |
| P55060_C387 | CSE1L Exportin-2 | 7553 |
| Q13838_C165 | DDX39B Spliceosome RNA helicase | 7554 |
| | DDX39B | |
| A6NE09_C163 | RPSAP58 Protein RPSAP58 | 7555 |
| Q9BTZ2_C209 | DHRS4 Dehydrogenase/reductase SDR | 7556 |
| | family member 4 | |
| Q8IY21_C517 | DDX60 Probable ATP-dependent RNA | 7557 |
| | helicase DDX60 | |
| P04075_C339 | ALDOA Fructose-bisphosphate | 7558 |
| | aldolase A | |
| P13639_C466 | EEF2 Elongation factor 2 | 7559 |
| Q99832_C29 | CCT7 T-complex protein 1 subunit eta | 7560 |
| P12814_C332 | ACTN1 Alpha-actinin-1 | 7561 |
| Q92619_C278 | HMHA1 Minor histocompatibility | 7562 |
| | protein HA-1 | |
| Q13131_C185 | PRKAA1 5-AMP-activated protein | 7563 |
| | kinase catalytic subunit | |
| P54646_C174 | PRKAA2 5-AMP-activated protein | 7564 |
| | kinase catalytic subunit | |
| Q00610_C926 | CLTC Clathrin heavy chain 1 | 7565 |
| Q00610_C934 | CLTC Clathrin heavy chain 1 | 7566 |
| Q99439_C175 | CNN2 Calponin-2 | 7567 |
| B0I1T2_C965 | MYO1G Unconventional myosin-Ig | 7568 |
| Q02252_C317 | ALDH6A1 Methylmalonate- | 7569 |
| | semialdehyde dehydrogenase | |
| P12955_C467 | PEPD Xaa-Pro dipeptidase | 7570 |
| P08238_C366 | HSP90AB1 Heat shock protein HSP | 7571 |
| | 90-beta | |
| P13639_C369 | EEF2 Elongation factor 2 | 7572 |
| P41240_C31 | CSK Tyrosine-protein kinase CSK | 7573 |
| P13639_C812 | EEF2 Elongation factor 2 | 7574 |
| P22736_C551 | NR4A1 Nuclear receptor subfamily 4 | 7575 |
| | group A member 1 | |
| Q8WVV9_C84 | HNRPLL Heterogeneous nuclear | 7576 |
| | ribonucleoprotein L-like | |
| O43707_C351 | ACTN4 Alpha-actinin-4 | 7577 |
| Q9H4B7_C340 | TUBB1 Tubulin beta-1 chain | 7578 |
| O15067_C270 | PFAS | 7579 |
| | Phosphoribosylformylglycinamidine | |
| | synthase | |
| Q13045_C232 | FLII Protein flightless-1 homolog | 7580 |
| Q13057_C144 | COASY Bifunctional coenzyme A | 7581 |
| | synthase | |
| P43243_C230 | MATR3 Matrin-3 | 7582 |
| A5YKK6_C624 | CNOT1 CCR4-NOT transcription | 7583 |
| | complex subunit 1 | |
| Q9Y6D5_C76 | ARFGEF2 Brefeldin A-inhibited | 7584 |
| | guanine nucleotide-exchange | |
| P49915_C489 | GMPS GMP synthase | 7585 |
| Q96BN8_C347 | FAM105B Protein FAM105B | 7586 |
| P43403_C78 | ZAP70 Tyrosine-protein kinase ZAP- | 7587 |
| | 70 | |
| Q9Y3D0_C158 | FAM96B Mitotic spindle-associated | 7588 |
| | MMXD complex subunit MI | |
| Q03518_C795 | TAP1 Antigen peptide transporter 1 | 7589 |
| Q86WS5_C64 | TMPRSS12 Transmembrane protease | 7590 |
| | serine 12 | |
| P50579_C298 | METAP2 Methionine aminopeptidase 2 | 7591 |
| Q14019_C52 | COTL1 Coactosin-like protein | 7592 |
| P34897_C119 | SHMT2 Serine | 7593 |
| | hydroxymethyltransferase, | |
| | mitochondrial | |
| Q86YV9_C695 | HPS6 Hermansky-Pudlak syndrome 6 | 7594 |
| | protein | |
| Q96FX7_C209 | TRMT61A tRNA (adenine(58)-N(1))- | 7595 |
| | methyltransferase catalytic | |
| P23528_C139 | CFL1 Cofilin-1 | 7596 |
| Q96F15_C238 | GIMAP5 GTPase IMAP family | 7597 |
| | member 5 | |
| P62888_C92 | RPL30 60S ribosomal protein L30 | 7598 |
| Q8N163_C644 | KIAA1967 DBIRD complex subunit | 7599 |
| | KIAA1967 | |
| Q9C0K0_C642 | BCL11B B-cell lymphoma/leukemia | 7600 |
| | 11B | |
| P53618_C888 | COPB1 Coatomer subunit beta | 7601 |
| P13639_C751 | EEF2 Elongation factor 2 | 7602 |
| P60763_C178 | RAC3 Ras-related C3 botulinum toxin | 7603 |
| | substrate 3 | |
| P63000_C178 | RAC1 Ras-related C3 botulinum toxin | 7604 |
| | substrate 1 | |
| P38606_C254 | ATP6V1A V-type proton ATPase | 7605 |
| | catalytic subunit A | |
| Q14683_C987 | SMC1A Structural maintenance of | 7606 |
| | chromosomes protein 1A | |
| P23528_C39 | CFL1 Cofilin-1 | 7607 |
| P17987_C147 | TCP1 T-complex protein 1 subunit | 7608 |
| | alpha | |
| P31946_C96 | YWHAB 14-3-3 protein beta/alpha | 7609 |
| Q63HN8_C1748 | RNF213 E3 ubiquitin-protein ligase | 7610 |
| | RNF213 | |
| P46782_C172 | RPS5 40S ribosomal protein S5 | 7611 |
| O00483_C44 | NDUFA4 NADH dehydrogenase | 7612 |
| P50570_C27 | DNM2 Dynamin-2 | 7613 |
| O75427_C179 | LRCH4 Leucine-rich repeat and | 7614 |
| | calponin homology domain-containing | |
| | protein 4 | |
| P22234_C81 | PAICS Multifunctional protein ADE2 | 7615 |
| P34932_C34 | HSPA4 Heat shock 70 kDa protein 4 | 7616 |
| H3BQZ7_C452 | Uncharacterized protein | 7617 |
| Q1KMD3_C452 | HNKNPUL2 Heterogeneous nuclear | 7618 |
| | ribonucleoprotein U-like protein 2 | |
| P62837_C85 | UBE2D2 Ubiquitin-conjugating | 7619 |
| | enzyme E2 D2 | |
| P61077_C85 | UBE2D3 Ubiquitin-conjugating | 7620 |
| | enzyme E2 D3 | |
| P52565_C79 | ARHGDIA Rho GDP-dissociation | 7621 |
| | inhibitor 1 | |
| Q9HCD5_C137 | NCOA5 Nuclear receptor coactivator 5 | 7622 |
| O14733_C260 | MAP2K7 Dual specificity mitogen- | 7623 |
| | activated protein kinase | |
| Q14203_C791 | DCTN1 Dynactin subunit 1 | 7624 |
| Q96JM7_C682 | L3MBTL3 Lethal(3)malignant brain | 7625 |
| | tumor-like protein 3 | |
| O14773_C365 | TPP1 Tripeptidyl-peptidase 1 | 7626 |
| P61158_C408 | ACTR3 Actin-related protein 3 | 7627 |
| P45974_C532 | USP5 Ubiquitin carboxyl-terminal | 7628 |
| | hydrolase 5 | |
| P23368_C120 | ME2 NAD-dependent malic enzyme, | 7629 |
| | mitochondrial | |
| P60903_C62 | S100A10 Protein S100-A10 | 7630 |
| Q07955_C148 | SRSF1 Serine/arginine-rich splicing | 7631 |
| | factor 1 | |
| P10644_C18 | PRKAR1A cAMP-dependent protein | 7632 |
| | kinase type I-alpha regulatory subunit | |
| P07814_C692 | EPRS Bifunctional glutamate/proline-- | 7633 |
| | tRNA ligase | |
| O15355_C13 | PPM1G Protein phosphatase 1G | 7634 |
| P08133_C669 | ANXA6 Annexin A6 | 7635 |
| P22314_C1039 | UBA1 Ubiquitin-like modifier- | 7636 |
| | activating enzyme 1 | |
| Q00839_C594 | HNRNPU Heterogeneous nuclear | 7637 |
| | ribonucleoprotein U | |
| O14980_C34 | XPO1 Exportin-1 | 7638 |
| O43290_C645 | SART1 U4/U6.U5 tri-snRNP- | 7639 |
| | associated protein 1 | |
| Q9Y5Y2_C72 | NUBP2 Cytosolic Fe—S cluster | 7640 |
| | assembly factor NUBP2 | |
| Q15365_C201 | PCBP1 Poly(rC)-binding protein 1 | 7641 |
| P30086_C168 | PEBP1 Phosphatidylethanolamine- | 7642 |
| | binding protein 1 | |
| P11142_C17 | HSPA8 Heat shock cognate 71 kDa | 7643 |
| | protein | |
| O60496_C110 | DOK2 Docking protein 2 | 7644 |
| P85037_C254 | FOXK1 Forkhead box protein K1 | 7645 |
| P54577_C250 | YARS Tyrosine--tRNA ligase, | 7646 |
| | cytoplasmic | |
| Q8IX01_C656 | SUGP2 SURP and G-patch domain- | 7647 |
| | containing protein 2 | |
| P22314_C1040 | UBA1 Ubiquitin-like modifier- | 7648 |
| | activating enzyme 1 | |
| Q709C8_C2177 | VPS13C Vacuolar protein sorting- | 7649 |
| | associated protein 13C | |
| Q709C8_C2440 | VPS13C Vacuolar protein sorting- | 7650 |
| | associated protein 13C | |
| P61158_C189 | ACTR3 Actin-related protein 3 | 7651 |
| P0CW22_C35 | RPS17L 40S ribosomal protein S17- | 7652 |
| | like | |
| Q6KC79_C1795 | NIPBL Nipped-B-like protein | 7653 |
| Q15042_C322 | RAB3GAP1 Rab3 GTPase-activating | 7654 |
| | protein catalytic subunit | |
| P60709_C285 | ACTB Actin, cytoplasmic 1 | 7655 |
| P04899_C112 | GNAI2 Guanine nucleotide-binding | 7656 |
| | protein G(i) subunit al | |
| P23396_C97 | RPS3 40S ribosomal protein S3 | 7657 |
| P00558_C316 | PGK1 Phosphoglycerate kinase 1 | 7658 |
| P39687_C123 | ANP32A Acidic leucine-rich nuclear | 7659 |
| | phosphoprotein 32 family member A | |
| P27708_C1889 | CAD CAD protein | 7660 |
| Q15646_C188 | OASL 2-5-oligoadenylate synthase-like | 7661 |
| | protein | |
| Q9ULA0_C413 | DNPEP Aspartyl aminopeptidase | 7662 |
| Q9HAU5_C578 | UPF2 Regulator of nonsense transcripts | 7663 |
| | 2 | |
| P50995_C384 | ANXA11 Annexin A11 | 7664 |
| P63220_C17 | RPS21 40S ribosomal protein S21 | 7665 |
| Q16822_C306 | PCK2 Phosphoenolpyruvate | 7666 |
| | carboxykinase | |
| P14921_C31 | ETS1 Protein C-ets-1 | 7667 |
| Q9BWU1_C349 | CDK19 Cyclin-dependent kinase 19 | 7668 |
| P60174_C164 | TPI1 Triosephosphate isomerase | 7669 |
| P55809_C67 | OXCT1 Succinyl-CoA:3-ketoacid | 7670 |
| | coenzyme A transferase 1, | |
| P54136_C369 | RARS Arginine--tRNA ligase, | 7671 |
| | cytoplasmic | |
| O60784_C415 | TOM1 Target of Myb protein 1 | 7672 |
| Q16630_C159 | CPSF6 Cleavage and polyadenylation | 7673 |
| | specificity factor subunit 6 | |
| Q13370_C410 | PDE3B cGMP-inhibited 3,5-cyclic | 7674 |
| | phosphodiesterase B | |
| P68104_C234 | EEF1A1 Elongation factor 1-alpha 1 | 7675 |
| P62937_C115 | PPIA Peptidyl-prolyl cis-trans | 7676 |
| | isomerase A | |
| O75390_C211 | CS Citrate synthase, mitochondrial | 7677 |
| Q92688_C123 | ANP32B Acidic leucine-rich nuclear | 7678 |
| | phosphoprotein 32 family member A | |
| A6NHR9_C1656 | SMCHD1 Structural maintenance of | 7679 |
| | chromosomes flexible hinge domain- | |
| | containing protein 1 | |
| Q3B7J2_C377 | GFOD2 Glucose-fructose | 7680 |
| | oxidoreductase domain-containing | |
| O15523_C296 | DDX3Y ATP-dependent RNA helicase | 7681 |
| | DDX3Y | |
| O00571_C298 | DDX3X ATP-dependent RNA helicase | 7682 |
| | DDX3X | |
| P61158_C235 | ACTR3 Actin-related protein 3 | 7683 |
| Q53EL6_C275 | PDCD4 Programmed cell death protein | 7684 |
| | 4 | |
| P05388_C27 | RPLP0 60S acidic ribosomal protein P0 | 7685 |
| Q96I99_C162 | SUCLG2 Succinyl-CoA ligase | 7686 |
| P08133_C114 | ANXA6 Annexin A6 | 7687 |
| P09104_C389 | ENO2 Gamma-enolase | 7688 |
| P06733_C389 | ENO1 Alpha-enolase | 7689 |
| P13929_C389 | ENO3 Beta-enolase | 7690 |
| P19838_C261 | NFKB1 Nuclear factor NF-kappa-B | 7691 |
| | p105 subunit | |
| Q96IJ6_C389 | GMPPA Mannose-1-phosphate | 7692 |
| | guanyltransferase alpha | |
| P78527_C3187 | PRKDC DNA-dependent protein | 7693 |
| | kinase catalytic subunit | |
| P04083_C270 | ANXA1 Annexin A1 | 7694 |
| Q86WV6_C309 | TMEM173 Transmembrane protein | 7695 |
| | 173 | |
| P31949_C13 | S100A11 Protein S100-A11 | 7696 |
| Q16181_C280 | SEPT7 Septin-7 | 7697 |
| P53621_C1185 | COPA Coatomer subunit alpha | 7698 |
| O75179_C210 | ANKRD17 Ankyrin repeat domain- | 7699 |
| | containing protein 17 | |
| P62333_C193 | PSMC6 26S protease regulatory | 7700 |
| | subunit 10B | |
| Q9Y5P6_C245 | GMPPB Mannose-1-phosphate | 7701 |
| | guanyltransferase beta | |
| P31948_C461 | STIP1 Stress-induced-phosphoprotein 1 | 7702 |
| Q96P48_C900 | ARAP1 Arf-GAP with Rho-GAP | 7703 |
| | domain, ANK repeat and PH domain 1 | |
| Q52LJ0_C216 | FAM98B Protein FAM98B | 7704 |
| P46779_C13 | RPL28 60S ribosomal protein L28 | 7705 |
| Q8N5W9_C81 | FAM101B Protein FAM101B | 7706 |
| P50914_C54 | RPL14 60S ribosomal protein L14 | 7707 |
| P00338_C293 | LDHA L-lactate dehydrogenase A | 7708 |
| | chain | |
| P62993_C32 | GRB2 Growth factor receptor-bound | 7709 |
| | protein 2 | |
| P85037_C439 | FOXK1 Forkhead box protein K1 | 7710 |
| Q14103_C126 | HNRNPD Heterogeneous nuclear | 7711 |
| | ribonucleoprotein D0 | |
| Q9NVA2_C41 | SEPT11 Septin-11 | 7712 |
| P43403_C346 | ZAP70 Tyrosine-protein kinase ZAP- | 7713 |
| | 70 | |
| Q562E7_C130 | WDR81 WD repeat-containing protein | 7714 |
| | 81 | |
| O60610_C796 | DIAPH1 Protein diaphanous homolog 1 | 7715 |
| P08133_C552 | ANXA6 Annexin A6 | 7716 |
| Q13418_C346 | ILK Integrin-linked protein kinase | 7717 |
| P49915_C523 | GMPS GMP synthase | 7718 |
| Q15459_C244 | SF3A1 Splicing factor 3A subunit 1 | 7719 |
| Q06124_C259 | PTPN11 Tyrosine-protein phosphatase | 7720 |
| | non-receptor type 11 | |
| Q02338_C288 | BDH1 D-beta-hydroxybutyrate | 7721 |
| | dehydrogenase, mitochondrial | |
| P46060_C338 | RANGAP1 Ran GTPase-activating | 7722 |
| | protein 1 | |
| Q14204_C4216 | DYNC1H1 Cytoplasmic dynein 1 | 7723 |
| | heavy chain 1 | |
| P40926_C285 | MDH2 Malate dehydrogenase, | 7724 |
| | mitochondrial | |
| Q9NX63_C112 | CHCHD3 Coiled-coil-helix-coiled-coil- | 7725 |
| | helix domain-containing protein 3 | |
| P62280_C116 | RPS11 40S ribosomal protein S11 | 7726 |
| Q9BZV1_C125 | UBXN6 UBX domain-containing | 7727 |
| | protein 6 | |
| O00299_C178 | CLIC1 Chloride intracellular channel | 7728 |
| | protein 1 | |
| O75592_C1131 | MYCBP2 Probable E3 ubiquitin- | 7729 |
| | protein ligase MYCBP2 | |
| P61601_C185 | NCALD Neurocalcin-delta | 7730 |
| P15498_C794 | VAV1 Proto-oncogene vav | 7731 |
| P12004_C81 | PCNA Proliferating cell nuclear antigen | 7732 |
| P60981_C23 | DSTN Destrin | 7733 |
| P14618_C474 | PKM Pyruvate kinase isozymes M1/M2 | 7734 |
| Q9Y3F4_C340 | STRAP Serine-threonine kinase | 7735 |
| | receptor-associated protein | |
| O75694_C704 | NUP155 Nuclear pore complex protein | 7736 |
| | Nup155 | |
| Q92888_C594 | ARHGEF1 Rho guanine nucleotide | 7737 |
| | exchange factor 1 | |
| O00264_C129 | PGRMC1 Membrane-associated | 7738 |
| | progesterone receptor component | |
| O15173_C159 | PGRMC2 Membrane-associated | 7739 |
| | progesterone receptor component | |
| Q15691_C228 | MAPRE1 Microtubule-associated | 7740 |
| | protein RP/EB family member | |
| Q13325_C137 | IFIT5 Interferon-induced protein with | 7741 |
| | tetratricopeptide | |
| Q9Y678_C296 | COPG1 Coatomer subunit gamma-1 | 7742 |
| Q5XKP0_C60 | QIL1 Protein QIL1 | 7743 |
| O43776_C438 | NARS Asparagine--tRNA ligase, | 7744 |
| | cytoplasmic | |
| O75531_C85 | BANF1 Barrier-to-autointegration | 7745 |
| | factor | |
| Q00577_C272 | PURA Transcriptional activator protein | 7746 |
| | Pur-alpha | |
| P61758_C113 | VBP1 Prefoldin subunit 3 | 7747 |
| P62330_C155 | ARF6 ADP-ribosylation factor 6 | 7748 |
| P09110_C381 | ACAA1 3-ketoacyl-CoA thiolase, | 7749 |
| | peroxisomal | |
| P60842_C134 | EIF4A1 Eukaryotic initiation factor | 7750 |
| | 4A-I | |
| Q8N1G4_C249 | LRRC47 Leucine-rich repeat- | 7751 |
| | containing protein 47 | |
| Q9Y5Z7_C673 | HCFC2 Host cell factor 2 | 7752 |
| P30485_C125 | HLA-B HLA class I histocompatibility | 7753 |
| | antigen, B-47 alpha | |
| P51812_C579 | RPS6KA3 Ribosomal protein S6 kinase | 7754 |
| | alpha-3 | |
| Q15418_C575 | RPS6KA1 Ribosomal protein S6 kinase | 7755 |
| | alpha-1 | |
| Q9P2J5_C554 | LARS Leucine--tRNA ligase, | 7756 |
| | cytoplasmic | |
| P00558_C108 | PGK1 Phosphoglycerate kinase 1 | 7757 |
| O14966_C120 | RAB7L1 Ras-related protein Rab-7L1 | 7758 |
| P13639_C591 | EEF2 Elongation factor 2 | 7759 |
| P07195_C36 | LDHB L-lactate dehydrogenase B | 7760 |
| | chain | |
| Q96EY7_C642 | PTCD3 Pentatricopeptide repeat- | 7761 |
| | containing protein 3, mitochondrial | |
| Q13469_C355 | NFATC2 Nuclear factor of activated T- | 7762 |
| | cells, cytoplasmic 2 | |
| Q96JH7_C219 | VCPIP1 Deubiquitinating protein | 7763 |
| | VCIP135 | |
| Q92619_C324 | HMHA1 Minor histocompatibility | 7764 |
| | protein HA-1 | |
| O00148_C164 | DDX39A ATP-dependent RNA | 7765 |
| | helicase DDX39A | |
| P16455_C150 | MGMT Methylated-DNA--protein- | 7766 |
| | cysteine methyltransferase | |
| P40763_C259 | STAT3 Signal transducer and activator | 7767 |
| | of transcription 3 | |
| P07203_C202 | GPX1 Glutathione peroxidase 1 | 7768 |
| P08575_C787 | PTPRC Receptor-type tyrosine-protein | 7769 |
| | phosphatase C | |
| Q9Y6E0_C394 | STK24 Serine/threonine-protein kinase | 7770 |
| | 24 | |
| B5ME19_C444 | EIF3CL Eukaryotic translation | 7771 |
| | initiation factor 3 subunit | |
| P33240_C150 | CSTF2 Cleavage stimulation factor | 7772 |
| | subunit 2 | |
| P52597_C267 | HNRNPF Heterogeneous nuclear | 7773 |
| | ribonucleoprotein F | |
| Q9H019_C52 | FAM54B Protein FAM54B | 7774 |
| Q9H479_C24 | FN3K Fructosamine-3-kinase | 7775 |
| O75369_C660 | FLNB Filamin-B | 7776 |
| P62241_C100 | RPS8 40S ribosomal protein S8 | 7777 |
| P30453_C188 | HLA-A HLA class I histocompatibility | 7778 |
| | antigen, A-34 alpha | |
| P01892_C188 | HLA-A HLA class I histocompatibility | 7779 |
| | antigen, A-2 alpha | |
| P01891_C188 | HLA-A HLA class I histocompatibility | 7780 |
| | antigen, A-68 alpha | |
| P30479_C188 | HLA-B HLA class I histocompatibility | 7781 |
| | antigen, B-41 alpha | |
| P30460_C188 | HLA-B HLA class I histocompatibility | 7782 |
| | antigen, B-8 alpha | |
| P43250_C474 | GRK6 G protein-coupled receptor | 7783 |
| | kinase 6 | |
| Q96JB2_C65 | COG3 Conserved oligomeric Golgi | 7784 |
| | complex subunit 3 | |
| P22102_C646 | GART Trifunctional purine | 7785 |
| | biosynthetic protein adenosine | |
| Q9BTC0_C1079 | DIDO1 Death-inducer obliterator 1 | 7786 |
| Q5SY16_C648 | NOL9 Polynucleotide 5-hydroxyl- | 7787 |
| | kinase NOL9 | |
| O75367_C297 | H2AFY Core histone macro-H2A.1 | 7788 |
| P10314_C188 | HLA-A HLA class I histocompatibility | 7789 |
| | antigen, A-32 alpha | |
| P30512_C188 | HLA-A HLA class I histocompatibility | 7790 |
| | antigen, A-29 alpha | |
| P30510_C188 | HLA-C HLA class I histocompatibility | 7791 |
| | antigen, Cw-14 alpha | |
| Q9TNN7_C188 | HLA-C HLA class I histocompatibility | 7792 |
| | antigen, Cw-5 alpha | |
| P30459_C188 | HLA-A HLA class I histocompatibility | 7793 |
| | antigen, A-74 alpha | |
| Q29963_C188 | HLA-C HLA class I histocompatibility | 7794 |
| | antigen, Cw-6 alpha | |
| Q29960_C188 | HLA-C HLA class I histocompatibility | 7795 |
| | antigen, Cw-16 alpha | |
| Q07000_C188 | HLA-C HLA class I histocompatibility | 7796 |
| | antigen, Cw-15 alpha | |
| P16189_C188 | HLA-A HLA class I histocompatibility | 7797 |
| | antigen, A-31 alpha | |
| Q29865_C188 | HLA-C HLA class I histocompatibility | 7798 |
| | antigen, Cw-18 alpha | |
| P30504_C188 | HLA-C HLA class I histocompatibility | 7799 |
| | antigen, Cw-4 alpha | |
| O60343_C1277 | TBC1D4 TBC1 domain family member | 7800 |
| | 4 | |
| Q14152_C478 | EIF3A Eukaryotic translation initiation | 7801 |
| | factor 3 subunit | |
| E9PMF8_C721 | PTPRC Receptor-type tyrosine-protein | 7802 |
| | phosphatase C | |
| Q01831_C60 | XPC DNA repair protein | 7803 |
| | complementing XP-C cells | |
| P55265_C773 | ADAR Double-stranded RNA-specific | 7804 |
| | adenosine deaminase | |
| P30153_C377 | PPP2R1A Serine/threonine-protein | 7805 |
| | phosphatase 2A 65 kDa regulatory | |
| | subunit A alpha isoform | |
| A6NE09_C148 | RPSAP58 Protein RPSAP58 | 7806 |
| Q9TNN7_C125 | HLA-C HLA class I histocompatibility | 7807 |
| | antigen, Cw-5 alpha | |
| Q95604_C125 | HLA-C HLA class I histocompatibility | 7808 |
| | antigen, Cw-17 alpha | |
| Q29963_C125 | HLA-C HLA class I histocompatibility | 7809 |
| | antigen, Cw-6 alpha | |
| Q29960_C125 | HLA-C HLA class I histocompatibility | 7810 |
| | antigen, Cw-16 alpha | |
| Q07000_C125 | HLA-C HLA class I histocompatibility | 7811 |
| | antigen, Cw-15 alpha | |
| Q9ULA0_C144 | DNPEP Aspartyl aminopeptidase | 7812 |
| P53396_C20 | ACLY ATP-citrate synthase | 7813 |
| P35251_C607 | RFC1 Replication factor C subunit 1 | 7814 |
| Q8IZ69_C463 | TRMT2A tRNA (uracil-5-)- | 7815 |
| | methyltransferase homolog A | |
| O00567_C52 | NOP56 Nucleolar protein 56 | 7816 |
| Q5JSL3_C160 | DOCK11 Dedicator of cytokinesis | 7817 |
| | protein 11 | |
| P21333_C649 | FLNA Filamin-A | 7818 |
| P21291_C122 | CSRP1 Cysteine and glycine-rich | 7819 |
| | protein 1 | |
| P22314_C278 | UBA1 Ubiquitin-like modifier- | 7820 |
| | activating enzyme 1 | |
| Q9P289_C410 | MST4 Serine/threonine-protein kinase | 7821 |
| | MST4 | |
| P46782_C66 | RPS5 40S ribosomal protein S5 | 7822 |
| Q92616_C1235 | GCN1L1 Translational activator GCN1 | 7823 |
| P27707_C45 | DCK Deoxycytidine kinase | 7824 |
| Q8NF91_C6415 | SYNE1 Nesprin-1 | 7825 |
| Q92538_C685 | GBF1 Golgi-specific brefeldin A- | 7826 |
| | resistance guanine nucleotide exchange | |
| | factor 1 | |
| P13639_C290 | EEF2 Elongation factor 2 | 7827 |
| Q15120_C41 | PDK3 | 7828 |
| O43765_C153 | SGTA Small glutamine-rich | 7829 |
| | tetratricopeptide repeat-containing | |
| | alpha | |
| P63244_C182 | GNB2L1 Guanine nucleotide-binding | 7830 |
| | protein subunit beta-2-like 1, N- | |
| | terminally processed | |
| P61978_C145 | HNRNPK Heterogeneous nuclear | 7831 |
| | ribonucleoprotein K | |
| Q9Y3D0_C93 | FAM96B Mitotic spindle-associated | 7832 |
| | MMXD complex subunit MI | |
| H3BQZ7_C405 | Uncharacterized protein | 7833 |
| Q1KMD3_C405 | HNRNPUL2 Heterogeneous nuclear | 7834 |
| | ribonucleoprotein U-like protein 2 | |
| Q92888_C815 | ARHGEF1 Rho guanine nucleotide | 7835 |
| | exchange factor 1 | |
| P30050_C17 | RPL12 60S ribosomal protein L12 | 7836 |
| P27348_C134 | YWHAQ 14-3-3 protein theta | 7837 |
| Q9UPW5_C1164 | AGTPBP1 Cytosolic carboxypeptidase | 7838 |
| | 1 | |
| Q13185_C177 | CBX3 Chromobox protein homolog 3 | 7839 |
| P50914_C42 | RPL14 60S ribosomal protein L14 | 7840 |
| P60709_C217 | ACTB Actin, cytoplasmic 1 | 7841 |
| Q6S8J3_C917 | POTEE POTE ankyrin domain family | 7842 |
| | member E | |
| Q52LJ0_C63 | FAM98B Protein FAM98B | 7843 |
| Q8TAQ2_C495 | SMARCC2 SWI/SNF complex subunit | 7844 |
| | SMARCC2 | |
| P04083_C324 | ANXA1 Annexin A1 | 7845 |
| Q86VP6_C413 | CAND1 Cullin-associated NEDD8- | 7846 |
| | dissociated protein 1 | |
| P40925_C137 | MDH1 Malate dehydrogenase, | 7847 |
| | cytoplasmic | |
| P23528_C80 | CFL1 Cofilin-1 | 7848 |
| Q14C86_C568 | GAPVD1 GTPase-activating protein | 7849 |
| | and VPS9 domain-containing protein 1 | |
| P62241_C182 | RPS8 40S ribosomal protein S8 | 7850 |
| Q86WR0_C83 | CCDC25 Coiled-coil domain- | 7851 |
| | containing protein 25 | |
| P00558_C50 | PGK1 Phosphoglycerate kinase 1 | 7852 |
| O00743_C192 | PPP6C Serine/threonine-protein | 7853 |
| | phosphatase 6 catalytic subunit | |
| O75934_C106 | BCAS2 Pre-mRNA-splicing factor | 7854 |
| | SPF27 | |
| Q92616_C1692 | GCN1L1 Translational activator GCN1 | 7855 |
| Q63HN8_C1614 | RNF213 E3 ubiquitin-protein ligase | 7856 |
| | RNF213 | |
| P17655_C405 | CAPN2 Calpain-2 catalytic subunit | 7857 |
| P43487_C132 | RANBP1 Ran-specific GTPase- | 7858 |
| | activating protein | |
| Q9BVP2_C251 | GNL3 Guanine nucleotide-binding | 7859 |
| | protein-like 3 | |
| O75995_C152 | SASH3 SAM and SH3 domain- | 7860 |
| | containing protein 3 | |
| Q7Z6Z7_C4341 | HUWE1 E3 ubiquitin-protein ligase | 7861 |
| | HUWE1 | |
| P21333_C2107 | FLNA Filamin-A | 7862 |
| Q9UQ90_C353 | SPG7 Paraplegin | 7863 |
| H3BN98_C196 | Uncharacterized protein | 7864 |
| P62244_C30 | RPS15A 40S ribosomal protein S15a | 7865 |
| Q9UPN7_C455 | PPP6R1 Serine/threonine-protein | 7866 |
| | phosphatase 6 regulatory | |
| P26641_C266 | EEF1G Elongation factor 1-gamma | 7867 |
| Q96F07_C346 | CYFIP2 Cytoplasmic FMR1- | 7868 |
| | interacting protein 2 | |
| Q16555_C504 | DPYSL2 Dihydropyrimidinase-related | 7869 |
| | protein 2 | |
| Q9H3U1_C426 | UNC45A Protein unc-45 homolog A | 7870 |
| Q9UBT2_C30 | UBA2 SUMO-activating enzyme | 7871 |
| | subunit 2 | |
| O60333_C1661 | KIF1B Kinesin-like protein KIF1B | 7872 |
| P35579_C1379 | MYH9 Myosin-9 | 7873 |
| P17844_C170 | DDX5 Probable ATP-dependent RNA | 7874 |
| | helicase DDX5 | |
| Q92841_C247 | DDX17 Probable ATP-dependent RNA | 7875 |
| | helicase DDX17 | |
| I3L3Q1_C657 | Uncharacterized protein | 7876 |
| Q6ZSZ5_C699 | ARHGEF18 Rho guanine nucleotide | 7877 |
| | exchange factor 18 | |
| Q15233_C145 | NONO Non-POU domain-containing | 7878 |
| | octamer-binding protein | |
| Q9Y490_C1202 | TLN1 Talin-1 | 7879 |
| Q9H0C8_C301 | ILKAP Integrin-linked kinase- | 7880 |
| | associated serine/threonine | |
| Q63HN8_C4111 | RNF213 E3 ubiquitin-protein ligase | 7881 |
| | RNF213 | |
| P54886_C612 | ALDH18A1 Delta-1-pyrroline-5- | 7882 |
| | carboxylate synthase | |
| Q9Y613_C502 | FHOD1 FH1/FH2 domain-containing | 7883 |
| | protein 1 | |
| Q86TI0_C604 | TBC1D1 TBC1 domain family member | 7884 |
| | 1 | |
| O60234_C96 | GMFG Glia maturation factor gamma | 7885 |
| P60983_C96 | GMFB Glia maturation factor beta | 7886 |
| Q9UIS9_C486 | MBD1 Methyl-CpG-binding domain | 7887 |
| | protein 1 | |
| Q9HB19_C332 | PLEKHA2 Pleckstrin homology | 7888 |
| | domain-containing family A member 2 | |
| O60234_C87 | GMFG Glia maturation factor gamma | 7889 |
| P60983_C87 | GMFB Glia maturation factor beta | 7890 |
| Q6FI81_C288 | CIAPIN1 Anamorsin | 7891 |
| Q5T4S7_C1230 | UBR4 E3 ubiquitin-protein ligase | 7892 |
| | UBR4 | |
| Q01826_C173 | SATB1 DNA-binding protein SATB1 | 7893 |
| Q9Y490_C1199 | TLN1 Talin-1 | 7894 |
| Q16656_C229 | NRF1 Nuclear respiratory factor 1 | 7895 |
| P60866_C36 | RPS20 40S ribosomal protein S20 | 7896 |
| Q9H361_C132 | PABPC3 Polyadenylate-binding protein | 7897 |
| | 3 | |
| Q13310_C132 | PABPC4 Polyadenylate-binding protein | 7898 |
| | 4 | |
| P11940_C132 | PABPC1 Polyadenylate-binding protein | 7899 |
| | 1 | |
| P31943_C267 | HNRNPH1 Heterogeneous nuclear | 7900 |
| | ribonucleoprotein H | |
| O43390_C99 | HNRNPR Heterogeneous nuclear | 7901 |
| | ribonucleoprotein R | |
| O60506_C96 | SYNCRIP Heterogeneous nuclear | 7902 |
| | ribonucleoprotein Q | |
| P36578_C208 | RPL4 60S ribosomal protein L4 | 7903 |
| O75170_C247 | PPP6R2 Serine/threonine-protein | 7904 |
| | phosphatase 6 regulatory | |
| Q14644_C58 | RASA3 Ras GTPase-activating protein | 7905 |
| | 3 | |
| Q01433_C230 | AMPD2 AMP deaminase 2 | 7906 |
| P55795_C267 | HNRNPH2 Heterogeneous nuclear | 7907 |
| | ribonucleoprotein H2 | |
| P63104_C94 | YWHAZ 14-3-3 protein zeta/delta | 7908 |
| Q9BXK1_C233 | KLF16 Krueppel-like factor 16 | 7909 |
| Q9UKV8_C188 | EIF2C2 Protein argonaute-2 | 7910 |
| Q9NVM9_C349 | Asun Protein asunder homolog | 7911 |
| P24928_C981 | POLR2A DNA-directed RNA | 7912 |
| | polymerase II subunit RPB1 | |
| Q15283_C314 | RASA2 Ras GTPase-activating protein | 7913 |
| | 2 | |
| P61224_C141 | RAP1B Ras-related protein Rap-1b | 7914 |
| P13804_C155 | ETFA Electron transfer flavoprotein | 7915 |
| | subunit alpha, mitochondrial | |
| Q14353_C91 | GAMT Guanidinoacetate N- | 7916 |
| | methyltransferase | |
| Q92616_C1595 | GCN1L1 Translational activator GCN1 | 7917 |
| O75995_C351 | SASH3 SAM and SH3 domain- | 7918 |
| | containing protein 3 | |
| Q9H270_C890 | VPS11 Vacuolar protein sorting- | 7919 |
| | associated protein 11 homolog | |
| P31948_C26 | STIP1 Stress-induced-phosphoprotein 1 | 7920 |
| Q13303_C248 | KCNAB2 Voltage-gated potassium | 7921 |
| | channel subunit beta-2 | |
| Q86X76_C165 | NIT1 Nitrilase homolog 1 | 7922 |
| P31146_C285 | CORO1A Coronin-1A | 7923 |
| Q02750_C277 | MAP2K1 Dual specificity mitogen- | 7924 |
| | activated protein kinase | |
| O95758_C68 | PTBP3 Polypyrimidine tract-binding | 7925 |
| | protein 3 | |
| P53621_C380 | COPA Coatomer subunit alpha | 7926 |
| Q9BUJ2_C487 | HNRNPUL1 Heterogeneous nuclear | 7927 |
| | ribonucleoprotein U-like protein | |
| Q92619_C469 | HMHA1 Minor histocompatibility | 7928 |
| | protein HA-1 | |
| Q9Y228_C380 | TRAF3IP3 TRAF3-interacting JNK- | 7929 |
| | activating modulator | |
| Q9BW61_C25 | DDA1 DET1- and DDB1-associated | 7930 |
| | protein 1 | |
| P21333_C1018 | FLNA Filamin-A | 7931 |
| O75427_C105 | LRCH4 Leucine-rich repeat and | 7932 |
| | calponin homology domain-containing | |
| | protein 4 | |
| P22314_C481 | UBA1 Ubiquitin-like modifier- | 7933 |
| | activating enzyme 1 | |
| Q8N7H5_C218 | PAF1 RNA polymerase II-associated | 7934 |
| | factor 1 homolog | |
| Q16644_C203 | MAPKAPK3 MAP kinase-activated | 7935 |
| | protein kinase 3 | |
| Q6PD62_C196 | CTR9 RNA polymerase-associated | 7936 |
| | protein CTR9 homolog | |
| P23919_C163 | DTYMK Thymidylate kinase | 7937 |
| Q9UKG1_C462 | APPL1 DCC-interacting protein 13- | 7938 |
| | alpha | |
| Q13155_C306 | AIMP2 Aminoacyl tRNA synthase | 7939 |
| | complex-interacting multif | |
| Q99439_C215 | CNN2 Calponin-2 | 7940 |
| Q99832_C450 | CCT7 T-complex protein 1 subunit eta | 7941 |
| Q8IXI2_C175 | RHOT1 Mitochondrial Rho GTPase 1 | 7942 |
| Q9Y4W2_C474 | LAS1L Ribosomal biogenesis protein | 7943 |
| | LAS1L | |
| P13716_C223 | ALAD Delta-aminolevulinic acid | 7944 |
| | dehydratase | |
| Q8IWX8_C168 | CHERP Calcium homeostasis | 7945 |
| | endoplasmic reticulum protein | |
| P08575_C1167 | PTPRC Receptor-type tyrosine-protein | 7946 |
| | phosphatase C | |
| E9PPU0_C406 | EPPK1 Epiplakin | 7947 |
| P15170_C327 | GSPT1 Eukaryotic peptide chain | 7948 |
| | release factor GTP-binding subunit | |
| | ERF3A | |
| Q9NZN3_C138 | EHD3 EH domain-containing protein 3 | 7949 |
| Q8WUH2_C826 | TGFBRAP1 Transforming growth | 7950 |
| | factor-beta receptor-associate protein 1 | |
| Q9BZZ5_C234 | API5 Apoptosis inhibitor 5 | 7951 |
| P53992_C910 | SEC24C Protein transport protein | 7952 |
| | Sec24C | |
| O15027_C1619 | SEC16A Protein transport protein | 7953 |
| | Sec16A | |
| O43791_C361 | SPOP Speckle-type POZ protein | 7954 |
| O95202_C552 | LETM1 LETM1 and EF-hand domain- | 7955 |
| | containing protein 1, mitochondrial | |
| Q9NZ09_C161 | UBAP1 Ubiquitin-associated protein 1 | 7956 |
| P45880_C103 | VDAC2 Voltage-dependent anion- | 7957 |
| | selective channel protein | |
| Q8IWB7_C401 | WDFY1 WD repeat and FYVE | 7958 |
| | domain-containing protein 1 | |
| O60216_C585 | RAD21 Double-strand-break repair | 7959 |
| | protein rad21 homolog | |
| O00567_C142 | NOP56 Nucleolar protein 56 | 7960 |
| P55265_C649 | ADAR Double-stranded RNA-specific | 7961 |
| | adenosine deaminase | |
| Q8WYP5_C521 | AHCTF1 Protein ELYS | 7962 |
| Q6PKG0_C502 | LARP1 La-related protein 1 | 7963 |
| Q6PJW8_C192 | CNST Consortin | 7964 |
| Q5VSL9_C418 | FAM40A Protein FAM40A | 7965 |
| Q92835_C385 | INPP5D Phosphatidylinositol 3,4,5- | 7966 |
| | trisphosphate 5-phosphatase 1 | |
| Q00610_C736 | CLTC Clathrin heavy chain 1 | 7967 |
| Q14019_C10 | COTL1 Coactosin-like protein | 7968 |
| Q9UEW8_C450 | STK39 STE20/SPS1-related proline- | 7969 |
| | alanine-rich protein kinase | |
| P22626_C50 | HNRNPA2B1 Heterogeneous nuclear | 7970 |
| | ribonucleoproteins A2/B1 | |
| P55795_C22 | HNRNPH2 Heterogeneous nuclear | 7971 |
| | ribonucleoprotein H2 | |
| Q8IXW5_C105 | RPAP2 Putative RNA polymerase II | 7972 |
| | subunit B1 CTD phosphatase RPAP2 | |
| Q92841_C584 | DDX17 Probable ATP-dependent RNA | 7973 |
| | helicase DDX17 | |
| P50552_C334 | VASP Vasodilator-stimulated | 7974 |
| | phosphoprotein | |
| P29728_C523 | OAS2 2-5-oligoadenylate synthase 2 | 7975 |
| Q9BUJ2_C391 | HNRNPUL1 Heterogeneous nuclear | 7976 |
| | ribonucleoprotein U-like protein | |
| Q5VWQ0_C282 | RSBN1 Round spermatid basic protein | 7977 |
| | 1 | |
| O75369_C2556 | FLNB Filamin-B | 7978 |
| P04075_C178 | ALDOA Fructose-bisphosphate | 7979 |
| | aldolase A | |
| Q9UID3_C81 | VPS51 Vacuolar protein sorting- | 7980 |
| | associated protein 51 homolog | |
| Q9ULL5_C173 | PRR12 Proline-rich protein 12 | 7981 |
| P14618_C423 | PKM Pyruvate kinase isozymes M1/M2 | 7982 |
| O15117_C778 | FYB FYN-binding protein | 7983 |
| Q02880_C426 | TOP2B DNA topoisomerase 2-beta | 7984 |
| P14618_C424 | PKM Pyruvate kinase isozymes M1/M2 | 7985 |
| O14976_C913 | GAK Cyclin-G-associated kinase | 7986 |
| Q14980_C1907 | NUMA1 Nuclear mitotic apparatus | 7987 |
| | protein 1 | |
| Q86WI3_C1190 | NLRC5 Protein NLRC5 | 7988 |
| Q6IS14_C129 | EIF5AL1 Eukaryotic translation | 7989 |
| | initiation factor 5A-1-like | |
| Q9Y2X3_C106 | NOP58 Nucleolar protein 58 | 7990 |
| Q9NRG7_C78 | SDR39U1 Epimerase family protein | 7991 |
| | SDR39U1 | |
| Q14761_C134 | PTPRCAP Protein tyrosine | 7992 |
| | phosphatase receptor type C-associated | |
| | protein | |
| P30479_C349 | HLA-B HLA class I histocompatibility | 7993 |
| | antigen, B-41 alpha | |
| P30460_C349 | HLA-B HLA class I histocompatibility | 7994 |
| | antigen, B-8 alpha | |
| Q6KC79_C2151 | NIPBL Nipped-B-like protein | 7995 |
| P26038_C284 | MSN Moesin | 7996 |
| Q9UL15_C118 | BAG5 BAG family molecular | 7997 |
| | chaperone regulator 5 | |
| Q15022_C325 | SUZ12 Polycomb protein SUZ12 | 7998 |
| Q8NBZ0_C179 | INO80E INO80 complex subunit E | 7999 |
| P42226_C355 | STAT6 Signal transducer and activator | 8000 |
| | of transcription 6 | |
| P37802_C63 | TAGLN2 Transgelin-2 | 8001 |
| O60313_C786 | OPA1 Dynamin-like 120 kDa protein, | 8002 |
| | mitochondrial | |
| Q8TB24_C881 | RIN3 Ras and Rab interactor 3 | 8003 |
| P42226_C356 | STAT6 Signal transducer and activator | 8004 |
| | of transcription 6 | |
| P13639_C693 | EEF2 Elongation factor 2 | 8005 |
| P13010_C493 | XRCC5 X-ray repair cross- | 8006 |
| | complementing protein 5 | |
| Q9NX46_C132 | ADPRHL2 Poly(ADP-ribose) | 8007 |
| | glycohydrolase ARH3 | |
| Q5RL73_C199 | RBM48 RNA-binding protein 48 | 8008 |
| P09001_C338 | MRPL3 39S ribosomal protein L3, | 8009 |
| | mitochondrial | |
| Q14204_C3089 | DYNC1H1 Cytoplasmic dynein 1 | 8010 |
| | heavy chain 1 | |
| Q15437_C767 | SEC23B Protein transport protein | 8011 |
| | Sec23B | |
| P30040_C157 | ERP29 Endoplasmic reticulum resident | 8012 |
| | protein 29 | |
| Q9UQ35_C956 | SRRM2 Serine/arginine repetitive | 8013 |
| | matrix protein 2 | |
| Q5RL73_C204 | RBM48 RNA-binding protein 48 | 8014 |
| Q12996_C646 | CSTF3 Cleavage stimulation factor | 8015 |
| | subunit 3 | |
| P15170_C276 | GSPT1 Eukaryotic peptide chain | 8016 |
| | release factor GTP-binding subunit | |
| | ERF3A | |
| Q9BY32_C146 | ITPA Inosine triphosphate | 8017 |
| | pyrophosphatase | |
| Q9Y3Z3_C80 | SAMHD1 SAM domain and HD | 8018 |
| | domain-containing protein 1 | |
| Q99590_C566 | SCAF11 Protein SCAF11 | 8019 |
| Q9BSQ5_C170 | CCM2 Malcavernin | 8020 |
| P07737_C128 | PFN1 Profilin-1 | 8021 |
| P45974_C195 | USP5 Ubiquitin carboxyl-terminal | 8022 |
| | hydrolase 5 | |
| Q9H2U2_C44 | PPA2 Inorganic pyrophosphatase 2, | 8023 |
| | mitochondrial | |
| Q92530_C185 | PSMF1 Proteasome inhibitor PI31 | 8024 |
| | subunit | |
| P26599_C23 | PTBP1 Polypyrimidine tract-binding | 8025 |
| | protein 1 | |
| P57075_C435 | UBASH3A Ubiquitin-associated and | 8026 |
| | SH3 domain-containing protein A | |
| P25208_C89 | NFYB Nuclear transcription factor Y | 8027 |
| | subunit beta | |
| Q8N6S5_C48 | ARL6IP6 ADP-ribosylation factor-like | 8028 |
| | protein 6-interacting protein 6 | |
| Q96AP0_C406 | ACD Adrenocortical dysplasia protein | 8029 |
| | homolog | |
| P25208_C85 | NFYB Nuclear transcription factor Y | 8030 |
| | subunit beta | |
| O14745_C206 | SLC9A3R1 Na(+)/H(+) exchange | 8031 |
| | regulatory cofactor NHE-RF1 | |
| Q9H6S0_C363 | YTHDC2 Probable ATP-dependent | 8032 |
| | RNA helicase YTHDC2 | |
| Q9BY32_C154 | ITPA Inosine triphosphate | 8033 |
| | pyrophosphatase | |
| Q9UQ13_C306 | SHOC2 Leucine-rich repeat protein | 8034 |
| | SHOC-2 | |
| P30876_C177 | POLR2B DNA-directed RNA | 8035 |
| | polymerase II subunit RPB2 | |
| Q8TB24_C484 | RIN3 Ras and Rab interactor 3 | 8036 |
| P37802_C38 | TAGLN2 Transgelin-2 | 8037 |
| P60174_C255 | TPI1 Triosephosphate isomerase | 8038 |
| Q99832_C511 | CCT7 T-complex protein 1 subunit eta | 8039 |
| O75592_C3152 | MYCBP2 Probable E3 ubiquitin- | 8040 |
| | protein ligase MYCBP2 | |
| Q9BSH5_C243 | HDHD3 Haloacid dehalogenase-like | 8041 |
| | hydrolase domain-containing 3 | |
| Q13573_C250 | SNW1 SNW domain-containing | 8042 |
| | protein 1 | |
| P46777_C100 | RPL5 60S ribosomal protein L5 | 8043 |
| O95571_C170 | ETHE1 Protein ETHE1, mitochondrial | 8044 |
| Q92556_C726 | ELMO1 Engulfment and cell motility | 8045 |
| | protein 1 | |
| P84074_C185 | HPCA Neuron-specific calcium- | 8046 |
| | binding protein hippocalcin | |
| P37235_C185 | HPCAL1 Hippocalcin-like | 8047 |
| | protein 1 | |
| Q9BSJ8_C370 | ESYT1 Extended | 8048 |
| | synaptotagmin-1 | |
| P51610_C227 | HCFC1 Host cell factor 1 | 8049 |
| P49753_C401 | ACOT2 Acyl-coenzyme A | 8050 |
| | thioesterase 2, mitochondrial | |
| J3QR44_C430 | CDK11B Cyclin-dependent | 8051 |
| | kinase 11B | |
| P21127_C440 | CDK11B Cyclin-dependent | 8052 |
| | kinase 11B | |
| O43149_C69 | ZZEF1 Zinc finger ZZ-type | 8053 |
| | and EF-hand domain- | |
| | containing | |
| Q9NZB2_C531 | FAM120A Constitutive | 8054 |
| | coactivator of PPAR-gamma- | |
| | like protein 1 | |
| Q6PJT7_C261 | ZC3H14 Zinc finger CCCH | 8055 |
| | domain-containing protein 14 | |
| Q9Y613_C31 | FHOD1 FH1/FH2 domain- | 8056 |
| | containing protein 1 | |
| Q9Y4F9_C596 | FAM65B Protein FAM65B | 8057 |
| Q93084_C614 | ATP2A3 | 8058 |
| | Sarcoplasmic/endoplasmic | |
| | reticulum calcium ATPase | |
| P78527_C25 | PRKDC DNA-dependent | 8059 |
| | protein kinase catalytic subunit | |
| Q15027_C501 | ACAP1 Arf-GAP with coiled- | 8060 |
| | coil, ANK repeat and PH | |
| | domain 1 | |
| Q9H2M9_C1336 | RAB3GAP2 Rab3 GTPase- | 8061 |
| | activating protein non-catalytic | |
| | subunit | |
| P62857_C27 | RPS28 40S ribosomal protein | 8062 |
| | S28 | |
| P60981_C163 | DSTN Destrin | 8063 |
| Q96SK2_C158 | TMEM209 Transmembrane | 8064 |
| | protein 209 | |
| P15153_C178 | RAC2 Ras-related C3 | 8065 |
| | botulinum toxin substrate 2 | |
| P37802_C124 | TAGLN2 Transgelin-2 | 8066 |
| Q63HN8_C3554 | RNF213 E3 ubiquitin-protein | 8067 |
| | ligase RNF213 | |
| O94915_C888 | FRYL Protein furry homolog- | 8068 |
| | like | |
| Q9UPR0_C90 | PLCL2 Inactive phospholipase | 8069 |
| | C-like protein 2 | |
| Q96ME7_C324 | ZNF512 Zinc finger protein | 8070 |
| | 512 | |
| Q8IZ73_C431 | RPUSD2 RNA | 8071 |
| | pseudouridylate synthase | |
| | domain-containing protein | |
| Q5SNT2_C498 | TMEM201 Transmembrane | 8072 |
| | protein 201 | |
| Q14980_C1937 | NUMA1 Nuclear mitotic | 8073 |
| | apparatus protein 1 | |
| Q9BSD7_C184 | NTPCR Cancer-related | 8074 |
| | nucleoside-triphosphatase | |
| P56192_C441 | MARS Methionine--tRNA | 8075 |
| | ligase, cytoplasmic | |
| Q9BWW4_C80 | SSBP3 Single-stranded DNA- | 8076 |
| | binding protein 3 | |
| P62834_C139 | RAP1A Ras-related protein | 8077 |
| | Rap-1A | |
| P49448_C172 | GLUD2 Glutamate | 8078 |
| | dehydrogenase 2, | |
| | mitochondrial | |
| P00367_C172 | GLUD1 Glutamate | 8079 |
| | dehydrogenase 1, | |
| | mitochondrial | |
| P23396_C134 | RPS3 40S ribosomal protein | 8080 |
| | S3 | |
| O75947_C101 | ATP5H ATP synthase subunit | 8081 |
| | d, mitochondrial | |
| Q9HC38_C171 | GLOD4 Glyoxalase domain- | 8082 |
| | containing protein 4 | |
| O00233_C59 | PSMD9 26S proteasome non- | 8083 |
| | ATPase regulatory subunit 9 | |
| P14866_C472 | HNRNPL Heterogeneous | 8084 |
| | nuclear ribonucleoprotein L | |
| Q04206_C105 | RELA Transcription factor | 8085 |
| | p65 | |
| Q96FW1_C23 | OTUB1 Ubiquitin thioesterase | 8086 |
| | OTUB1 | |
| Q9UI30_C33 | TRMT112 tRNA | 8087 |
| | methyltransferase 112 | |
| | homolog | |
| O43815_C316 | STRN Striatin | 8088 |
| P08047_C755 | SP1 Transcription factor Sp1 | 8089 |
| P60174_C104 | TPI1 Triosephosphate | 8090 |
| | isomerase | |
| O75362_C286 | ZNF217 Zinc finger protein | 8091 |
| | 217 | |
| O60496_C36 | DOK2 Docking protein 2 | 8092 |
| P49792_C2791 | RANBP2 E3 SUMO-protein | 8093 |
| | ligase RanBP2 | |
| Q13428_C38 | TCOF1 Treacle protein | 8094 |
| Q8TD47_C41 | RPS4Y2 40S ribosomal | 8095 |
| | protein S4, Y isoform 2 | |
| P22090_C41 | RPS4Y1 40S ribosomal | 8096 |
| | protein S4, Y isoform 1 | |
| Q8NDH3_C504 | NPEPL1 Probable | 8097 |
| | aminopeptidase NPEPL1 | |
| Q96P11_C362 | NSUN5 Putative | 8098 |
| | methyltransferase NSUN5 | |
| Q8N3X1_C877 | FNBP4 Formin-binding | 8099 |
| | protein 4 | |
| Q92685_C21 | ALG3 Dol-P- | 8100 |
| | Man:Man(5)GlcNAc(2)-PP- | |
| | Dol alpha-1,3- | |
| | mannosyltransferase | |
| Q00013_C242 | MPP1 55 kDa erythrocyte | 8101 |
| | membrane protein | |
| Q9BTX1_C468 | TMEM48 Nucleoporin NDC1 | 8102 |
| Q96RU3_C609 | FNBP1 Formin-binding | 8103 |
| | protein 1 | |
| P31749_C310 | AKT1 RAC-alpha | 8104 |
| | serine/threonine-protein kinase | |
| Q9Y243_C307 | AKT3 RAC-gamma | 8105 |
| | serine/threonine-protein kinase | |
| P31751_C311 | AKT2 RAC-beta | 8106 |
| | serine/threonine-protein kinase | |
| O95248_C1374 | SBF1 Myotubularin-related | 8107 |
| | protein 5 | |
| O94953_C694 | KDM4B Lysine-specific | 8108 |
| | demethylase 4B | |
| O95295_C66 | SNAPIN SNARE-associated | 8109 |
| | protein Snapin | |
| Q9Y4W2_C690 | LAS1L Ribosomal biogenesis | 8110 |
| | protein LAS1L | |
| P29375_C838 | KDM5A Lysine-specific | 8111 |
| | demethylase 5A | |
| P52948_C1068 | NUP98 Nuclear pore complex | 8112 |
| | protein Nup98-Nup96 | |
| Q9Y5Y2_C269 | NUBP2 Cytosolic Fe—S cluster | 8113 |
| | assembly factor NUBP2 | |
| P12814_C370 | ACTN1 Alpha-actinin-1 | 8114 |
| O75131_C506 | CPNE3 Copine-3 | 8115 |
| Q7Z2W4_C38 | ZC3HAV1 Zinc finger CCCH- | 8116 |
| | type antiviral protein 1 | |
| P51610_C1886 | HCFC1 Host cell factor 1 | 8117 |
| P51610_C1895 | HCFC1 Host cell factor 1 | 8118 |
| P40939_C322 | HADHA Trifunctional enzyme | 8119 |
| | subunit alpha, mitochondrial | |
| Q63HN8_C3261 | RNF213 E3 ubiquitin-protein | 8120 |
| | ligase RNF213 | |
| I3L3Q1_C264 | Uncharacterized protein | 8121 |
| Q6ZSZ5_C306 | ARHGEF18 Rho guanine | 8122 |
| | nucleotide exchange factor 18 | |
| Q9BRJ7_C88 | NUDT16L1 Protein | 8123 |
| | syndesmos | |
| P52701_C615 | MSH6 DNA mismatch repair | 8124 |
| | protein Msh6 | |
| Q9Y4K1_C976 | AIM1 Absent in melanoma 1 | 8125 |
| | protein | |
| Q15631_C225 | TSN Translin | 8126 |
| Q9H9L4_C117 | KANSL2 KAT8 regulatory | 8127 |
| | NSL complex subunit 2 | |
| Q66K74_C435 | MAP1S Microtubule- | 8128 |
| | associated protein 1S | |
| Q66K74_C440 | MAP1S Microtubule- | 8129 |
| | associated protein 1S | |
| O75319_C325 | DUSP11 RNA/RNP complex- | 8130 |
| | 1-interacting phosphatase | |
| Q02543_C16 | RPL18A 60S ribosomal | 8131 |
| | protein L18a | |
| Q96HA1_C307 | POM121 Nuclear envelope | 8132 |
| | pore membrane protein POM | |
| | 121 | |
| Q6PJE2_C42 | POMZP3 POM121 and ZP3 | 8133 |
| | fusion protein | |
| A8CG34_C284 | POM121C Nuclear envelope | 8134 |
| | pore membrane protein POM | |
| | 121C | |
| O14523_C359 | C2CD2L C2 domain- | 8135 |
| | containing protein 2-like | |
| Q99986_C50 | VRK1 Serine/threonine- | 8136 |
| | protein kinase VRK1 | |
| P62995_C118 | TRA2B Transformer-2 protein | 8137 |
| | homolog beta | |
| P62995_C119 | TRA2B Transformer-2 protein | 8138 |
| | homolog beta | |
| Q15050_C52 | RRS1 Ribosome biogenesis | 8139 |
| | regulatory protein homolog | |
| P08575_C608 | PTPRC Receptor-type | 8140 |
| | tyrosine-protein phosphatase C | |
| O43704_C22 | SULT1B1 Sulfotransferase | 8141 |
| | family cytosolic 1B member 1 | |
| P46060_C573 | RANGAP1 Ran GTPase- | 8142 |
| | activating protein 1 | |
| E9PMF8_C542 | PTPRC Receptor-type | 8143 |
| | tyrosine-protein phosphatase C | |
| Q13469_C386 | NFATC2 Nuclear factor of | 8144 |
| | activated T-cells, cytoplasmic | |
| | 2 | |
| A6NHR9_C1710 | SMCHD1 Structural | 8145 |
| | maintenance of chromosomes | |
| | flexible hinge domain | |
| | containing 1 | |
| O43159_C451 | RRP8 Ribosomal RNA- | 8146 |
| | processing protein 8 | |
| Q99439_C274 | CNN2 Calponin-2 | 8147 |
| Q99439_C290 | CNN2 Calponin-2 | 8148 |
| Q06330_C397 | RBPJ Recombining binding | 8149 |
| | protein suppressor of hairless | |
| O43264_C568 | ZW10 | 8150 |
| | Centromere/kinetochore | |
| | protein zw10 homolog | |
| Q8N806_C35 | UBR7 Putative E3 ubiquitin- | 8151 |
| | protein ligase UBR7 | |
| Q9UGV2_C359 | NDRG3 Protein NDRG3 | 8152 |
| P08758_C316 | ANXA5 Annexin A5 | 8153 |
| Q92878_C1296 | RAD50 DNA repair protein | 8154 |
| | RAD50 | |
| B0V043_C112 | VARS Valyl-tRNA synthetase | 8155 |
| O94903_C261 | PROSC Proline synthase co- | 8156 |
| | transcribed bacterial homolog | |
| P53041_C11 | PPP5C Serine/threonine- | 8157 |
| | protein phosphatase 5 | |
| Q92608_C1655 | DOCK2 Dedicator of | 8158 |
| | cytokinesis protein 2 | |
| P35236_C62 | PTPN7 Tyrosine-protein | 8159 |
| | phosphatase non-receptor type | |
| | 7 | |
| Q86YV0_C896 | RASAL3 RAS protein | 8160 |
| | activator like-3 | |
| Q6P1X6_C98 | C8orf82 UPF0598 protein | 8161 |
| | C8orf82 | |
| Q8TDN6_C52 | BRIX1 Ribosome biogenesis | 8162 |
| | protein BRX1 homolog | |
| Q15424_C225 | SAFB Scaffold attachment | 8163 |
| | factor B1 | |
| Q14151_C224 | SAFB2 Scaffold attachment | 8164 |
| | factor B2 | |
| Q8WXH0_C6161 | SYNE2 Nesprin-2 | 8165 |
| P45880_C13 | VDAC2 Voltage-dependent | 8166 |
| | anion-selective channel protein | |
| Q92575_C144 | UBXN4 UBX domain- | 8167 |
| | containing protein 4 | |
| P07741_C83 | APRT Adenine | 8168 |
| | phosphoribosyltransferase | |
| Q9BWH6_C1039 | RPAP1 RNA polymerase II- | 8169 |
| | associated protein 1 | |
| Q96EP0_C551 | RNF31 E3 ubiquitin-protein | 8170 |
| | ligase RNF31 | |
| Q9BYG3_C237 | MKI67IP MKI67 FHA | 8171 |
| | domain-interacting nucleolar | |
| | phosphoprotein | |
| P17655_C39 | CAPN2 Calpain-2 catalytic | 8172 |
| | subunit | |
| Q12789_C42 | GTF3C1 General transcription | 8173 |
| | factor 3C polypeptide 1 | |
| O00410_C1078 | IPO5 Importin-5 | 8174 |
| Q15796_C70 | SMAD2 Mothers against | 8175 |
| | decapentaplegic homolog 2 | |
| Q9H7D7_C656 | WDR26 WD repeat-containing | 8176 |
| | protein 26 | |
| O94804_C947 | STK10 Serine/threonine- | 8177 |
| | protein kinase 10 | |
| A6NHR9_C59 | SMCHD1 Structural | 8178 |
| | maintenance of chromosomes | |
| | flexible hinge domain | |
| | containing 1 | |
| Q13501_C26 | SQSTM1 Sequestosome-1 | 8179 |
| Q13501_C27 | SQSTM1 Sequestosome-1 | 8180 |
| P04899_C352 | GNAI2 Guanine nucleotide- | 8181 |
| | binding protein G(i) subunit | |
| | alpha-2 | |
| P40222_C523 | TXLNA Alpha-taxilin | 8182 |
| Q6UUV9_C131 | CRTC1 CREB-regulated | 8183 |
| | transcription coactivator 1 | |
| O75643_C428 | SNRNP200 U5 small nuclear | 8184 |
| | ribonucleoprotein 200 kDa | |
| | helicas | |
| P29590_C338 | PML Protein PML | 8185 |
| Q32MZ4_C14 | LRRMP1 Leucine-rich repeat | 8186 |
| | flightless-interacting protein | |
| P07814_C1487 | EPRS Bifunctional | 8187 |
| | glutamate/proline--tRNA | |
| | ligase | |
| Q08999_C368 | RBL2 Retinoblastoma-like | 8188 |
| | protein 2 | |
| Q6IA86_C475 | ELP2 Elongator complex | 8189 |
| | protein 2 | |
| A6NHR9_C61 | SMCHD1 Structural | 8190 |
| | maintenance of chromosomes | |
| | flexible hinge domain | |
| | containing 1 | |
| P35611_C525 | ADD1 Alpha-adducin | 8191 |
| P52701_C88 | MSH6 DNA mismatch repair | 8192 |
| | protein Msh6 | |
| Q14137_C108 | BOP1 Ribosome biogenesis | 8193 |
| | protein BOP1 | |
| Q12802_C1232 | AKAP13 A-kinase anchor | 8194 |
| | protein 13 | |
| Q92800_C423 | EZH1 Histone-lysine N- | 8195 |
| | methyltransferase EZH1 | |
| Q8N9N8_C89 | EIF1AD Probable RNA- | 8196 |
| | binding protein EIF1AD | |
| Q13813_C2233 | SPTAN1 Spectrin alpha chain, | 8197 |
| | non-erythrocytic 1 | |
| Q96EK4_C48 | THAP11 THAP domain- | 8198 |
| | containing protein 11 | |
| O95267_C713 | RASGRP1 RAS guanyl- | 8199 |
| | releasing protein 1 | |
| P62851_C59 | RPS25 40S ribosomal protein | 8200 |
| | S25 | |
| O60551_C104 | NMT2 Glycylpeptide N- | 8201 |
| | tetradecanoyltransferase 2 | |
| Q9Y228_C135 | TRAF3IP3 TRAF3-interacting | 8202 |
| | JNK-activating modulator | |
| I3L1I5_C189 | Uncharacterized protein | 8203 |
| P08047_C68 | SP1 Transcription factor Sp1 | 8204 |
| E7ETI0_C21 | ARPC4-TTLL3 Protein | 8205 |
| | ARPC4-TTLL3 | |
| P59998_C21 | ARPC4 Actin-related protein | 8206 |
| | 2/3 complex subunit 4 | |
| Q7KZ85_C336 | SUPT6H Transcription | 8207 |
| | elongation factor SPT6 | |
| Q9HB58_C461 | SP110 Sp110 nuclear body | 8208 |
| | protein | |
| B0I1T2_C793 | MYO1G Unconventional | 8209 |
| | myosin-Ig | |
| Q99497_C106 | PARK7 Protein DJ-1 | 8210 |
| Q9HB19_C191 | PLEKHA2 Pleckstrin | 8211 |
| | homology domain-containing | |
| | family A member 2 | |
| B0I1T2_C788 | MYO1G Unconventional | 8212 |
| | myosin-Ig | |
| Q9NWY4_C17 | C4orf27 UPF0609 protein | 8213 |
| | C4orf27 | |
| Q9H4L4_C243 | SENP3 Sentrin-specific | 8214 |
| | protease 3 | |
| A0AVT1_C347 | UBA6 Ubiquitin-like | 8215 |
| | modifier-activating enzyme 6 | |
| P23497_C238 | SP100 Nuclear autoantigen | 8216 |
| | Sp-100 | |
| Q9NU22_C4041 | MDN1 Midasin | 8217 |
| Q92835_C506 | INPP5D Phosphatidylinositol | 8218 |
| | 3,4,5-trisphosphate 5- | |
| | phosphatase D | |
| Q66GS9_C316 | CEP135 Centrosomal protein | 8219 |
| | of 135 kDa | |
| P48739_C13 | PITPNB Phosphatidylinositol | 8220 |
| | transfer protein beta isoform | |
| P35914_C323 | HMGCL | 8221 |
| | Hydroxymethylglutaryl-CoA | |
| | lyase, mitochondrial | |
| Q5JSL3_C1190 | DOCK11 Dedicator of | 8222 |
| | cytokinesis protein 11 | |
| Q96JY6_C160 | PDLIM2 PDZ and LIM | 8223 |
| | domain protein 2 | |
| Q7Z5K2_C94 | WAPAL Wings apart-like | 8224 |
| | protein homolog | |
| Q00653_C57 | NFKB2 Nuclear factor NF- | 8225 |
| | kappa-B p100 subunit | |
| Q8TC07_C686 | TBC1D15 TBC1 domain | 8226 |
| | family member 15 | |
| Q8N1F7_C422 | NUP93 Nuclear pore complex | 8227 |
| | protein Nup93 | |
| P57678_C210 | GEMIN4 Gem-associated | 8228 |
| | protein 4 | |
| Q7Z5R6_C401 | APBB1IP Amyloid beta A4 | 8229 |
| | precursor protein-binding | |
| | family B | |
| Q9NX24_C18 | NHP2 H/ACA | 8230 |
| | ribonucleoprotein complex | |
| | subunit 2 | |
| P55265_C622 | ADAR Double-stranded RNA- | 8231 |
| | specific adenosine deaminase | |
| Q8WVV9_C464 | HNRPLL Heterogeneous | 8232 |
| | nuclear ribonucleoprotein L- | |
| | like | |
| Q99832_C364 | CCT7 T-complex protein 1 | 8233 |
| | subunit eta | |
| P63244_C286 | GNB2L1 Guanine nucleotide- | 8234 |
| | binding protein subunit beta-2- | |
| | like 1 | |
| Q13427_C310 | PPIG Peptidyl-prolyl cis-trans | 8235 |
| | isomerase G | |
| P48147_C25 | PREP Prolyl endopeptidase | 8236 |
| Q9UJZ1_C167 | STOML2 Stomatin-like | 8237 |
| | protein 2 | |
| O75369_C26 | FLNB Filamin-B | 8238 |
| P21333_C53 | FLNA Filamin-A | 8239 |
| Q92974_C335 | ARHGEF2 Rho guanine | 8240 |
| | nucleotide exchange factor 2 | |
| Q92835_C1050 | INPP5D Phosphatidylinositol | 8241 |
| | 3,4,5-trisphosphate 5- | |
| | phosphatase 1 | |
| Q4G0F5_C334 | VPS26B Vacuolar protein | 8242 |
| | sorting-associated protein 26B | |
| P17844_C234 | DDX5 Probable ATP- | 8243 |
| | dependent RNA helicase | |
| | DDX5 | |
| Q9BSD7_C101 | NTPCR Cancer-related | 8244 |
| | nucleoside-triphosphatase | |
| Q92619_C1020 | HMHA1 Minor | 8245 |
| | histocompatibility protein HA- | |
| | 1 | |
| Q14790_C360 | CASP8 Caspase-8 | 8246 |
| O15067_C1285 | PFAS | 8247 |
| | Phosphoribosylformylglycina | |
| | midine synthase | |
| O15067_C1287 | PFAS | 8248 |
| | Phosphoribosylformylglycina | |
| | midine synthase | |
| O60880_C124 | SH2D1A SH2 domain- | 8249 |
| | containing protein 1A | |
| Q92888_C537 | ARHGEF1 Rho guanine | 8250 |
| | nucleotide exchange factor 1 | |
| O14879_C343 | IFIT3 Interferon-induced | 8251 |
| | protein with tetratricopeptide | |
| Q93052_C364 | LPP Lipoma-preferred partner | 8252 |
| P22695_C192 | UQCRC2 Cytochrome b-c1 | 8253 |
| | complex subunit 2, | |
| | mitochondrial | |
| P10398_C597 | ARAF Serine/threonine- | 8254 |
| | protein kinase A-Raf | |
| P78347_C215 | GTF2I General transcription | 8255 |
| | factor II-I | |
| P08575_C1259 | PTPRC Receptor-type | 8256 |
| | tyrosine-protein phosphatase C | |
| Q9UHB9_C562 | SRP68 Signal recognition | 8257 |
| | particle 68 kDa protein | |
| P40121_C290 | CAPG Macrophage-capping | 8258 |
| | protein | |
| P36578_C250 | RPL4 60S ribosomal protein | 8259 |
| | L4 | |
| A9UHW6_C49 | MIF4GD MIF4G domain- | 8260 |
| | containing protein | |
| Q9Y3B4_C83 | SF3B14 Pre-mRNA branch | 8261 |
| | site protein p14 | |
| Q93008_C1212 | USP9X Probable ubiquitin | 8262 |
| | carboxyl-terminal hydrolase | |
| | FAF | |
| P11171_C179 | EPB41 Protein 4.1 | 8263 |
| Q9BZS1_C169 | FOXP3 Forkhead box protein | 8264 |
| | P3 | |
| Q13469_C256 | NFATC2 Nuclear factor of | 8265 |
| | activated T-cells, cytoplasmic | |
| | 2 | |
| Q9BWW8_C25 | APOL6 Apolipoprotein L6 | 8266 |
| Q15366_C217 | PCBP2 Poly(rC)-binding | 8267 |
| | protein 2 | |
| P13796_C101 | LCP1 Plastin-2 | 8268 |
| Q16851_C123 | UGP2 UTP--glucose-1- | 8269 |
| | phosphate uridylyltransferase | |
| P53602_C108 | MVD Diphosphomevalonate | 8270 |
| | decarboxylase | |
| Q9NR30_C378 | DDX21 Nucleolar RNA | 8271 |
| | helicase 2 | |
| P13727_C201 | PRG2 Bone marrow | 8272 |
| | proteoglycan | |
| O14867_C646 | BACH1 Transcription | 8273 |
| | regulator protein BACH1 | |
| O43772_C283 | SLC25A20 Mitochondrial | 8274 |
| | camitine/acylcamitine carrier | |
| | protein | |
| Q9Y3F4_C305 | STRAP Serine-threonine | 8275 |
| | kinase receptor-associated | |
| | protein | |
| Q12802_C1677 | AKAP13 A-kinase anchor | 8276 |
| | protein 13 | |
| Q9BSU1_C222 | C16orf70 UPF0183 protein | 8277 |
| | C16orf70 | |
| P78362_C320 | SRPK2 SRSF protein kinase 2 | 8278 |
| Q9NZJ7_C385 | MTCH1 Mitochondrial carrier | 8279 |
| | homolog 1 | |
| P51692_C688 | STAT5B Signal transducer | 8280 |
| | and activator of transcription 5 | |
| Q04637_C662 | EIF4G1 Eukaryotic translation | 8281 |
| | initiation factor 4 gamma 1 | |
| Q08AF3_C369 | SLFN5 Schlafen family | 8282 |
| | member 5 | |
| Q9NZB2_C919 | FAM120A Constitutive | 8283 |
| | coactivator of PPAR-gamma- | |
| | like protein 1 | |
| O60684_C238 | KPNA6 Importin subunit | 8284 |
| | alpha-7 | |
| O15131_C238 | KPNA5 Importin subunit | 8285 |
| | alpha-6 | |
| P52294_C240 | KPNA1 Importin subunit | 8286 |
| | alpha-1 | |
| Q8ND71_C214 | GIMAP8 GTPase IMAP | 8287 |
| | family member 8 | |
| P35658_C728 | NUP214 Nuclear pore | 8288 |
| | complex protein Nup214 | |
| Q32MZ4_C644 | LRRFIP1 Leucine-rich repeat | 8289 |
| | flightless-interacting protein | |
| Q8TCU6_C1116 | PREX1 Phosphatidylinositol | 8290 |
| | 3,4,5-trisphosphate-dependent | |
| Q96I24_C460 | FUBP3 Far upstream element- | 8291 |
| | binding protein 3 | |
| Q6KC79_C1066 | NIPBL Nipped-B-like protein | 8292 |
| Q03519_C353 | TAP2 Antigen peptide | 8293 |
| | transporter 2 | |
| Q7Z3K3_C547 | POGZ Pogo transposable | 8294 |
| | element with ZNF domain | |
| Q7L8W6_C88 | ATPBD4 ATP-binding | 8295 |
| | domain-containing protein 4 | |
| Q9Y2Z0_C62 | SUGT1 Suppressor of G2 | 8296 |
| | allele of SKP1 homolog | |
| P34932_C376 | HSPA4 Heat shock 70 kDa | 8297 |
| | protein 4 | |
| Q92598_C376 | HSPH1 Heat shock protein | 8298 |
| | 105 kDa | |
| P17844_C221 | DDX5 Probable ATP- | 8299 |
| | dependent RNA helicase | |
| | DDX5 | |
| Q92841_C298 | DDX17 Probable ATP- | 8300 |
| | dependent RNA helicase | |
| | DDX17 | |
| Q5JSL3_C1204 | DOCK11 Dedicator of | 8301 |
| | cytokinesis protein 11 | |
| P09564_C230 | CD7 T-cell antigen CD7 | 8302 |
| P27635_C105 | RPL10 60S ribosomal protein | 8303 |
| | L10 | |
| Q9UKA8_C173 | RCAN3 Calcipressin-3 | 8304 |
| P00492_C106 | HPRT1 Hypoxanthine-guanine | 8305 |
| | phosphoribosyltransferase | |
| P26038_C117 | MSN Moesin | 8306 |
| P12955_C482 | PEPD Xaa-Pro dipeptidase | 8307 |
| Q9NR33_C84 | POLE4 DNA polymerase | 8308 |
| | epsilon subunit 4 | |
| Q9H8W4_C219 | PLEKHF2 Pleckstrin | 8309 |
| | homology domain-containing | |
| | family F member | |
| Q8WYP5_C1131 | AHCTF1 Protein ELYS | 8310 |
| Q9Y6K5_C350 | OAS3 2-5-oligoadenylate | 8311 |
| | synthase 3 | |
| P41250_C616 | GARS Glycine--tRNA ligase | 8312 |
| Q8NF50_C143 | DOCK8 Dedicator of | 8313 |
| | cytokinesis protein 8 | |
| H3BQZ7_C57 | Uncharacterized protein | 8314 |
| Q1KMD3_C57 | HNRNPUL2 Heterogeneous | 8315 |
| | nuclear ribonucleoprotein U- | |
| | like protein | |
| Q5JTH9_C102 | RRP12 RRP12-like protein | 8316 |
| Q9C0C9_C910 | UBE2O Ubiquitin-conjugating | 8317 |
| | enzyme E2 O | |
| Q9C0C9_C913 | UBE2O Ubiquitin-conjugating | 8318 |
| | enzyme E2 O | |
| Q8NF50_C197 | DOCK8 Dedicator of | 8319 |
| | cytokinesis protein 8 | |
| O95466_C45 | FMNL1 Formin-like protein 1 | 8320 |
| Q53GL7_C50 | PARP10 Polymerase | 8321 |
| Q9P2R3_C675 | ANKFY1 Ankyrin repeat and | 8322 |
| | FYVE domain-containing | |
| | protein | |
| O75607_C105 | NPM3 Nucleoplasmin-3 | 8323 |
| Q9NXA8_C303 | SIRT5 NAD-dependent | 8324 |
| | protein deacylase sirtuin-5, | |
| | mitochondrial | |
| Q00013_C454 | MPP1 55 kDa erythrocyte | 8325 |
| | membrane protein | |
| O60701_C276 | UGDH UDP-glucose 6- | 8326 |
| | dehydrogenase | |
| Q15149_C730 | PLEC Plectin | 8327 |
| Q9Y4P8_C393 | WIPI2 WD repeat domain | 8328 |
| | phosphoinositide-interacting | |
| | protein | |
| P27816_C126 | MAP4 Microtubule-associated | 8329 |
| | protein 4 | |
| O95487_C87 | SEC24B Protein transport | 8330 |
| | protein Sec24B | |
| Q3SXM5_C265 | HSDL1 Inactive | 8331 |
| | hydroxysteroid | |
| | dehydrogenase-like protein | |
| H3BQZ7_C293 | Uncharacterized protein | 8332 |
| Q1KMD3_C293 | HNRNPUL2 Heterogeneous | 8333 |
| | nuclear ribonucleoprotein U- | |
| | like protein 2 | |
| P16871_C349 | IL7R Interleukin-7 receptor | 8334 |
| | subunit alpha | |
| Q9HB90_C377 | RRAGC Ras-related GTP- | 8335 |
| | binding protein C | |
| Q14919_C54 | DRAP1 Dr1-associated | 8336 |
| | corepressor | |
| Q86YS7_C867 | KIAA0528 Uncharacterized | 8337 |
| | protein KIAA0528 | |
| P49915_C456 | GMPS GMP synthase | 8338 |
| Q13428_C1298 | TCOF1 Treacle protein | 8339 |
| Q9H9A6_C264 | LRRC40 Leucine-rich repeat- | 8340 |
| | containing protein 40 | |
| Q12802_C1548 | AKAP13 A-kinase anchor | 8341 |
| | protein 13 | |
| Q06330_C313 | RBPJ Recombining binding | 8342 |
| | protein suppressor of hairless | |
| Q969E8_C17 | TSR2 Pre-rRNA-processing | 8343 |
| | protein TSR2 homolog | |
| Q9ULT8_C254 | HECTD1 E3 ubiquitin-protein | 8344 |
| | ligase HECTD1 | |
| P51858_C12 | HDGF Hepatoma-derived | 8345 |
| | growth factor | |
| Q99543_C394 | DNAJC2 DnaJ homolog | 8346 |
| | subfamily C member 2 | |
| P12268_C331 | IMPDH2 Inosine-5- | 8347 |
| | monophosphate | |
| | dehydrogenase 2 | |
| P42166_C341 | TMPO Lamina-associated | 8348 |
| | polypeptide 2, isoform alpha | |
| Q92888_C911 | ARHGEF1 Rho guanine | 8349 |
| | nucleotide exchange factor 1 | |
| Q9BZ29_C628 | DOCK9 Dedicator of | 8350 |
| | cytokinesis protein 9 | |
| O95336_C78 | PGLS 6- | 8351 |
| | phosphogluconolactonase | |
| Q9UEW8_C525 | STK39 STE20/SPS1-related | 8352 |
| | proline-alanine-rich protein | |
| | kinase | |
| Q63HN8_C614 | RNF213 E3 ubiquitin-protein | 8353 |
| | ligase RNF213 | |
| P49023_C108 | PXN Paxillin | 8354 |
| Q16666_C679 | IFI16 Gamma-interferon- | 8355 |
| | inducible protein 16 | |
| Q9Y5Y2_C196 | NUBP2 Cytosolic Fe—S cluster | 8356 |
| | assembly factor NUBP2 | |
| Q9Y5Y2_C202 | NUBP2 Cytosolic Fe—S cluster | 8357 |
| | assembly factor NUBP2 | |
| Q9GZR7_C49 | DDX24 ATP-dependent RNA | 8358 |
| | helicase DDX24 | |
| Q96F63_C78 | CCDC97 Coiled-coil domain- | 8359 |
| | containing protein 97 | |
| Q9Y5Y2_C199 | NUBP2 Cytosolic Fe—S cluster | 8360 |
| | assembly factor NUBP2 | |
| Q96F07_C1112 | CYFIP2 Cytoplasmic FMR1- | 8361 |
| | interacting protein 2 | |
| Q9UPU5_C153 | USP24 Ubiquitin carboxyl- | 8362 |
| | terminal hydrolase 24 | |
| P02545_C570 | LMNA Prelamin-A/C | 8363 |
| Q7L576_C1088 | CYF1P1 Cytoplasmic FMR1- | 8364 |
| | interacting protein 1 | |
| O95671_C333 | ASMTL N-acetylserotonin O- | 8365 |
| | methyltransferase-like protein | |
| Q7Z6B0_C424 | CCDC91 Coiled-coil domain- | 8366 |
| | containing protein 91 | |
| P49321_C708 | NASP Nuclear autoantigenic | 8367 |
| | sperm protein | |
| P61978_C132 | HNRNPK Heterogeneous | 8368 |
| | nuclear ribonucleoprotein K | |
| P42224_C255 | STAT1 Signal transducer and | 8369 |
| | activator of transcription 1 | |
| Q01518_C427 | CAP1 Adenylyl cyclase- | 8370 |
| | associated protein 1 | |
| O94874_C32 | UFL1 E3 UFM1-protein ligase | 8371 |
| | 1 | |
| P42224_C247 | STAT1 Signal transducer and | 8372 |
| | activator of transcription 1 | |
| Q96BY6_C2164 | DOCK10 Dedicator of | 8373 |
| | cytokinesis protein 10 | |
| O43586_C305 | PSTPIP1 Proline-serine- | 8374 |
| | threonine phosphatase- | |
| | interacting protein 1 | |
| P50851_C1704 | LRBA Lipopolysaccharide- | 8375 |
| | responsive and beige-like | |
| | anchor protein | |
| Q96QR8_C17 | PURB Transcriptional | 8376 |
| | activator protein Pur-beta | |
| Q9H3H3_C222 | C11orf68 UPF0696 protein | 8377 |
| | C11orf68 | |
| Q14997_C1840 | PSME4 Proteasome activator | 8378 |
| | complex subunit 4 | |
| Q9BUP3_C172 | HTATIP2 Oxidoreductase | 8379 |
| | HTATIP2 | |
| Q5VSL9_C769 | FAM40A Protein FAM40A | 8380 |
| Q9NW68_C49 | BSDC1 BSD domain- | 8381 |
| | containing protein 1 | |
| Q96F07_C1265 | CYFIP2 Cytoplasmic FMR1- | 8382 |
| | interacting protein 2 | |
| P60468_C39 | SEC61B Protein transport | 8383 |
| | protein Sec61 subunit beta | |
| Q15061_C380 | WDR43 WD repeat-containing | 8384 |
| | protein 43 | |
| Q04759_C322 | PRKCQ Protein kinase C theta | 8385 |
| | type | |
| Q13615_C826 | MTMR3 Myotubularin-related | 8386 |
| | protein 3 | |
| Q13630_C116 | TSTA3 GDP-L-fucose | 8387 |
| | synthase | |
| Q9Y6R4_C1604 | MAP3K4 Mitogen-activated | 8388 |
| | protein kinase kinase kinase 4 | |
| P49711_C155 | CTCF Transcriptional | 8389 |
| | repressor CTCF | |
| Q9UPS6_C1405 | SETD1B Histone-lysine N- | 8390 |
| | methyltransferase SETD1B | |
| Q8WVT3_C160 | TRAPPC12 Trafficking | 8391 |
| | protein particle complex | |
| | subunit 12 | |
| P55060_C842 | CSE1L Exportin-2 | 8392 |
| Q9BSJ8_C611 | ESYT1 Extended | 8393 |
| | synaptotagmin-1 | |
| P52948_C1027 | NUP98 Nuclear pore complex | 8394 |
| | protein Nup98-Nup96 | |
| P50991_C120 | CCT4 T-complex protein 1 | 8395 |
| | subunit delta | |
| Q13107_C702 | USP4 Ubiquitin carboxyl- | 8396 |
| | terminal hydrolase 4 | |
| P22681_C508 | CBL E3 ubiquitin-protein | 8397 |
| | ligase CBL | |
| Q08117_C26 | AES Amino-terminal enhancer | 8398 |
| | of split | |
| P19784_C336 | CSNK2A2 Casein kinase II | 8399 |
| | subunit alpha | |
| Q16576_C97 | RBBP7 Histone-binding | 8400 |
| | protein RBBP7 | |
| Q8NBF2_C716 | NHLRC2 NHL repeat- | 8401 |
| | containing protein 2 | |
| Q00403_C223 | GTF2B Transcription | 8402 |
| | initiation factor IIB | |
| P46527_C148 | CDKN1B Cyclin-dependent | 8403 |
| | kinase inhibitor 1B | |
| P17844_C191 | DDX5 Probable ATP- | 8404 |
| | dependent RNA helicase | |
| | DDX5 | |
| P22061_C102 | PCMT1 Protein-L- | 8405 |
| | isoaspartate(D-aspartate) O- | |
| | methyltransferase | |
| P35611_C430 | ADD1 Alpha-adducin | 8406 |
| P52888_C682 | THOP1 Thimet oligopeptidase | 8407 |
| Q01081_C67 | U2AF1 Splicing factor U2AF | 8408 |
| | 35 kDa subunit | |
| Q96BY9_C320 | TMEM66 Store-operated | 8409 |
| | calcium entry-associated | |
| | regulatory | |
| Q14152_C78 | EIF3A Eukaryotic translation | 8410 |
| | initiation factor 3 subunit | |
| P13489_C409 | RNH1 Ribonuclease inhibitor | 8411 |
| Q07960_C91 | ARHGAP1 Rho GTPase- | 8412 |
| | activating protein 1 | |
| Q9UGP4_C305 | LIMD1 LIM domain- | 8413 |
| | containing protein 1 | |
| P27816_C535 | MAP4 Microtubule-associated | 8414 |
| | protein 4 | |
| Q8NCE2_C182 | MTMR14 Myotubularin- | 8415 |
| | related protein 14 | |
| O00273_C154 | DFFA DNA fragmentation | 8416 |
| | factor subunit alpha | |
| Q92973_C153 | TNPO1 Transportin-1 | 8417 |
| P51608_C413 | MECP2 Methyl-CpG-binding | 8418 |
| | protein 2 | |
| Q63HN8_C3008 | RNF213 E3 ubiquitin-protein | 8419 |
| | ligase RNF213 | |
| O15294_C620 | OGT UDP-N- | 8420 |
| | acetylglucosamine--peptide N- | |
| | acetylglucosaminyl transferase | |
| P42166_C561 | TMPO Lamina-associated | 8421 |
| | polypeptide 2, isoform alpha | |
| Q6F5E8_C746 | RLTPR Leucine-rich repeat- | 8422 |
| | containing protein 16C | |
| P55265_C392 | ADAR Double-stranded RNA- | 8423 |
| | specific adenosine deaminase | |
| Q8NB37_C154 | PDDC1 Parkinson disease 7 | 8424 |
| | domain-containing protein 1 | |
| Q6JBY9_C155 | RCSD1 CapZ-interacting | 8425 |
| | protein | |
| Q9UJU2_C321 | LEF1 Lymphoid enhancer- | 8426 |
| | binding factor 1 | |
| O00186_C501 | STXBP3 Syntaxin-binding | 8427 |
| | protein 3 | |
| Q96BY6_C1310 | DOCK10 Dedicator of | 8428 |
| | cytokinesis protein 10 | |
| O00186_C498 | STXBP3 Syntaxin-binding | 8429 |
| | protein 3 | |
| P63104_C25 | YWHAZ 14-3-3 protein | 8430 |
| | zeta/delta | |
| Q8WU79_C196 | SMAP2 Stromal membrane- | 8431 |
| | associated protein 2 | |
| Q00765_C18 | REEP5 Receptor expression- | 8432 |
| | enhancing protein 5 | |
| P51608_C429 | MECP2 Methyl-CpG-binding | 8433 |
| | protein 2 | |
| O60841_C749 | EIF5B Eukaryotic translation | 8434 |
| | initiation factor 5B | |
| P42331_C524 | ARHGAP25 Rho GTPase- | 8435 |
| | activating protein 25 | |
| P35579_C988 | MYH9 Myosin-9 | 8436 |
| Q14151_C672 | SAFB2 Scaffold attachment | 8437 |
| | factor B2 | |
| Q99490_C811 | AGAP2 Arf-GAP with | 8438 |
| | GTPase, ANK repeat and PH | |
| | domain-containing protein 2 | |
| O60307_C762 | MAST3 Microtubule- | 8439 |
| | associated serine/threonine- | |
| | protein ki | |
| P27707_C9 | DCK Deoxycytidine kinase | 8440 |
| Q99704_C308 | DOK1 Docking protein 1 | 8441 |
| O75940_C214 | SMNDC1 Survival of motor | 8442 |
| | neuron-related-splicing factor | |
| | 3 | |
| O15269_C438 | SPTLC1 Serine | 8443 |
| | palmitoyltransferase 1 | |
| Q5EBM0_C119 | CMPK2 UMP-CMP kinase 2, | 8444 |
| | mitochondrial | |
| Q96F86_C137 | EDC3 Enhancer of mRNA- | 8445 |
| | decapping protein 3 | |
| Q86YV0_C1005 | RASAL3 RAS protein | 8446 |
| | activator like-3 | |
| P30044_C204 | PRDX5 Peroxiredoxin-5, | 8447 |
| | mitochondrial | |
| P78527_C1904 | PRKDC DNA-dependent | 8448 |
| | protein kinase catalytic subunit | |
| Q9BXP2_C911 | SLC12A9 Solute carrier | 8449 |
| | family 12 member 9 | |
| Q9Y6G9_C51 | DYNC1LI1 Cytoplasmic | 8450 |
| | dynein 1 light intermediate | |
| | chain 1 | |
| Q12962_C174 | TAF10 Transcription initiation | 8451 |
| | factor TFIID subunit 10 | |
| Q8IV53_C412 | DENND1C DENN domain- | 8452 |
| | containing protein 1C | |
| Q8NFW8_C364 | CMAS N-acylneuraminate | 8453 |
| | cytidylyltransferase | |
| Q7Z4S6_C299 | KIF21A Kinesin-like protein | 8454 |
| | KIF21A | |
| Q9Y383_C348 | LUC7L2 Putative RNA- | 8455 |
| | binding protein Luc7-like 2 | |
| Q12768_C21 | KLAA0196 WASH complex | 8456 |
| | subunit strumpellin | |
| Q9ULX6_C211 | AKAP8L A-kinase anchor | 8457 |
| | protein 8-like | |
| Q2NKJ3_C584 | CTC1 CST complex subunit | 8458 |
| | CTC1 | |
| Q7Z4W1_C138 | DCXR L-xylulose reductase | 8459 |
| P78527_C1507 | PRKDC DNA-dependent | 8460 |
| | protein kinase catalytic subunit | |
| Q9NQC3_C1101 | RTN4 Reticulon-4 | 8461 |
| Q8NCE2_C429 | MTMR14 Myotubularin- | 8462 |
| | related protein 14 | |
| P41227_C194 | NAA10 N-alpha- | 8463 |
| | acetyltransferase 10 | |
| Q08AF3_C846 | SLFN5 Schlafen family | 8464 |
| | member 5 | |
| Q9NXG2_C31 | THUMPD1 THUMP domain- | 8465 |
| | containing protein 1 | |
| Q00722_C945 | PLCB2 1-phosphatidylinositol | 8466 |
| | 4,5-bisphosphate | |
| | phosphodiesterase beta-2 | |
| Q14694_C94 | USP10 Ubiquitin carboxyl- | 8467 |
| | terminal hydrolase 10 | |
| Q12933_C287 | TRAF2 TNF receptor- | 8468 |
| | associated factor 2 | |
| P14735_C974 | IDE Insulin-degrading enzyme | 8469 |
| P32456_C405 | GBP2 Interferon-induced | 8470 |
| | guanylate-binding protein 2 | |
| P32456_C404 | GBP2 Interferon-induced | 8471 |
| | guanylate-binding protein 2 | |
| Q6PJG6_C539 | BRAT1 BRCA1-associated | 8472 |
| | ATM activator 1 | |
| Q9NPG8_C337 | ZDHHC4 Probable | 8473 |
| | palmitoyltransferase ZDHHC4 | |
| Q9Y2K7_C840 | KDM2A Lysine-specific | 8474 |
| | demethylase 2A | |
| P12081_C507 | HARS Histidine--tRNA ligase, | 8475 |
| | cytoplasmic | |
| Q13469_C231 | NFATC2 Nuclear factor of | 8476 |
| | activated T-cells, cytoplasmic | |
| | 2 | |
| Q16611_C14 | BAK1 Bcl-2 homologous | 8477 |
| | antagonist/killer | |
| P35579_C931 | MYH9 Myosin-9 | 8478 |
| Q9UFW8_C92 | CGGBP1 CGG triplet repeat- | 8479 |
| | binding protein 1 | |
| P11171_C49 | EPB41 Protein 4.1 | 8480 |
| Q9UQ35_C2116 | SRRM2 Serine/arginine | 8481 |
| | repetitive matrix protein 2 | |
| Q8WXI9_C308 | GATAD2B Transcriptional | 8482 |
| | repressor p66-beta | |
| Q96EY8_C132 | MMAB Cob(I)yrinic acid a,c- | 8483 |
| | diamide adenosyltransferase, | |
| | mitochondrial | |
| Q01433_C107 | AMPD2 AMP deaminase 2 | 8484 |
| Q9H0L4_C150 | CSTF2T Cleavage stimulation | 8485 |
| | factor subunit 2 tau variant | |
| P16188_C363 | HLA-A HLA class I histocompatibility | 8486 |
| | antigen, A-30 alpha | |
| P04439_C363 | HLA-A HLA class I histocompatibility | 8487 |
| | antigen, A-3 alpha | |
| P30443_C363 | HLA-A HLA class I histocompatibility | 8488 |
| | antigen, A-1 alpha | |
| O75663_C87 | TIPRL TIP41-like protein | 8489 |
| P19838_C61 | NFKB1 Nuclear factor NF- | 8490 |
| | kappa-B p105 subunit | |
| P07858_C319 | CTSB Cathepsin B | 8491 |
| O60502_C596 | MGEA5 Bifunctional protein | 8492 |
| | NCOAT | |
| Q9HB58_C283 | SP110 Sp110 nuclear body | 8493 |
| | protein | |
| P21333_C2543 | FLNA Filamin-A | 8494 |
| Q9BTE6_C209 | AARSD1 Alanyl-tRNA | 8495 |
| | editing protein Aarsd1 | |
| Q04864_C524 | REL Proto-oncogene c-Rel | 8496 |
| O75400_C39 | PRPF40A Pre-mRNA- | 8497 |
| | processing factor 40 homolog | |
| | A | |
| P04150_C367 | NR3C1 Glucocorticoid | 8498 |
| | receptor | |
| P33241_C283 | LSP1 Lymphocyte-specific | 8499 |
| | protein 1 | |
| O60934_C487 | NBN Nibrin | 8500 |
| Q86W50_C448 | METTL16 Methyltransferase- | 8501 |
| | like protein 16 | |
| Q9UQ35_C872 | SRRM2 Serine/arginine | 8502 |
| | repetitive matrix protein 2 | |
| Q8NDH3_C81 | NPEPL1 Probable | 8503 |
| | aminopeptidase NPEPL1 | |
| O43815_C765 | STRN Striatin | 8504 |
| O15145_C162 | ARPC3 Actin-related protein | 8505 |
| | 2/3 complex subunit 3 | |
| O15355_C164 | PPM1G Protein phosphatase | 8506 |
| | 1G | |
| H3BQZ7_C308 | Uncharacterized protein | 8507 |
| Q1KMD3_C308 | HNRNPUL2 Heterogeneous | 8508 |
| | nuclear ribonucleoprotein U- | |
| | like protein | |
| Q9NQ88_C114 | TIGAR Fructose-2,6- | 8509 |
| | bisphosphatase TIGAR | |
| P23497_C309 | SP100 Nuclear autoantigen | 8510 |
| | Sp-100 | |
| A2A288_C367 | ZC3H12D Probable | 8511 |
| | ribonuclease ZC3H12D | |
| Q9C0B6_C491 | FAM5B Protein FAM5B | 8512 |
| Q9UJW0_C258 | DCTN4 Dynactin subunit 4 | 8513 |
| P05771_C217 | PRKCB Protein kinase C beta | 8514 |
| | type | |
| Q96RS6_C376 | NUDCD1 NudC domain- | 8515 |
| | containing protein 1 | |
| Q8TD19_C878 | NEK9 Serine/threonine- | 8516 |
| | protein kinase Nek9 | |
| O95786_C680 | DDX58 Probable ATP- | 8517 |
| | dependent RNA helicase | |
| | DDX58 | |
| O94763_C44 | URI1 Unconventional | 8518 |
| | prefoldin RPB5 interactor 1 | |
| Q6PCB5_C280 | RSBN1L Round spermatid | 8519 |
| | basic protein 1-like protein | |
| Q09666_C1833 | AHNAK Neuroblast | 8520 |
| | differentiation-associated | |
| | protein AHNA | |
| O95861_C42 | BPNT1 3(2),5-bisphosphate | 8521 |
| | nucleotidase 1 | |
| Q96B23_C57 | C18orf25 Uncharacterized | 8522 |
| | protein C18orf25 | |
| Q9UER7_C699 | DAXX Death domain- | 8523 |
| | associated protein 6 | |
| Q7Z6I6_C954 | ARHGAP30 Rho GTPase- | 8524 |
| | activating protein 30 | |
| Q9P107_C335 | GMIP GEM-interacting | 8525 |
| | protein | |
| Q06323_C22 | PSME1 Proteasome activator | 8526 |
| | complex subunit 1 | |
| Q9P107_C336 | GMIP GEM-interacting | 8527 |
| | protein | |
| P35579_C569 | MYH9 Myosin-9 | 8528 |
| P13489_C75 | RNH1 Ribonuclease inhibitor | 8529 |
| Q9NY27_C22 | PPP4R2 Serine/threonine- | 8530 |
| | protein phosphatase 4 | |
| | regulatory | |
| Q8NFH5_C255 | NUP35 Nucleoporin NUP53 | 8531 |
| P13489_C85 | RNH1 Ribonuclease inhibitor | 8532 |
| Q00610_C870 | CLTC Clathrin heavy chain 1 | 8533 |
| O95071_C2267 | UBR5 E3 ubiquitin-protein | 8534 |
| | ligase UBR5 | |
| Q6NZY4_C393 | ZCCHC8 Zinc finger CCHC | 8535 |
| | domain-containing protein 8 | |
| A6QL63_C783 | BTBD11 Ankyrin repeat and | 8536 |
| | BTB/POZ domain-containing | |
| | protein | |
| Q09666_C1900 | AHNAK Neuroblast | 8537 |
| | differentiation-associated | |
| | protein AHNA | |
| Q09161_C44 | NCBP1 Nuclear cap-binding | 8538 |
| | protein subunit 1 | |
| Q5JSP0_C43 | FGD3 FYVE, RhoGEF and | 8539 |
| | PH domain-containing protein | |
| | 3 | |
| Q14839_C1594 | CHD4 Chromodomain- | 8540 |
| | helicase-DNA-binding protein | |
| | 4 | |
| Q16566_C202 | CAMK4 Calcium/calmodulin- | 8541 |
| | dependent protein kinase type | |
| | 1 | |
| Q8WTW3_C513 | COG1 Conserved oligomeric | 8542 |
| | Golgi complex subunit 1 | |
| Q09666_C2162 | AHNAK Neuroblast | 8543 |
| | differentiation-associated | |
| | protein AHNA | |
| Q9HA64_C24 | FN3KRP Ketosamine-3-kinase | 8544 |
| Q96E39_C338 | RBMXL1 RNA binding motif | 8545 |
| | protein, X-linked-like-1 | |
| P35610_C92 | SOAT1 Sterol O- | 8546 |
| | acyltransferase 1 | |
| Q96T76_C549 | MMS19 MMS19 nucleotide | 8547 |
| | excision repair protein | |
| | homolog | |
| Q9H4A3_C547 | WNK1 Serine/threonine- | 8548 |
| | protein kinase WNK1 | |
| Q7Z2T5_C320 | TRMT1L TRMT1-like protein | 8549 |
| Q99996_C3868 | AKAP9 A-kinase anchor | 8550 |
| | protein 9 | |
| Q96RU3_C70 | FNBP1 Formin-binding | 8551 |
| | protein 1 | |
| Q9H9A6_C54 | LRRC40 Leucine-rich repeat- | 8552 |
| | containing protein 40 | |
| O75569_C106 | PRKRA Interferon-inducible | 8553 |
| | double stranded RNA- | |
| | dependent | |
| P04150_C302 | NR3C1 Glucocorticoid | 8554 |
| | receptor | |
| Q9NUQ9_C10 | FAM49B Protein FAM49B | 8555 |
| P20592_C707 | MX2 Interferon-induced GTP- | 8556 |
| | binding protein Mx2 | |
| Q8N5K1_C92 | CISD2 CDGSH iron-sulfur | 8557 |
| | domain-containing protein 2 | |
| O14497_C336 | ARID1A AT-rich interactive | 8558 |
| | domain-containing protein 1A | |
| O75694_C874 | NUP155 Nuclear pore | 8559 |
| | complex protein Nup155 | |
| Q5W0V3_C298 | FAM160B1 Protein | 8560 |
| | FAM160B1 | |
| Q9NSD9_C195 | FARSB Phenylalanine--tRNA | 8561 |
| | ligase beta subunit | |
| P45984_C177 | MAPK9 Mitogen-activated | 8562 |
| | protein kinase 9 | |
| Q92835_C956 | INPP5D Phosphatidylinositol | 8563 |
| | 3,4,5-trisphosphate 5- | |
| | phosphatase | |
| Q96EV2_C726 | RBM33 RNA-binding protein | 8564 |
| | 33 | |
| P55198_C571 | MLLT6 Protein AF-17 | 8565 |
| O75475_C204 | PSIP1 PC4 and SFRS1- | 8566 |
| | interacting protein | |
| P51812_C229 | RPS6KA3 Ribosomal protein | 8567 |
| | S6 kinase alpha-3 | |
| Q15418_C223 | RPS6KA1 Ribosomal protein | 8568 |
| | S6 kinase alpha-1 | |
| O94886_C791 | TMEM63A Transmembrane | 8569 |
| | protein 63A | |
| Q14005_C975 | IL16 Pro-interleukin-16 | 8570 |
| P13639_C41 | EEF2 Elongation factor 2 | 8571 |
| Q63HN8_C310 | RNF213 E3 ubiquitin-protein | 8572 |
| | ligase RNF213 | |
| Q96QD9_C242 | FYTTD1 UAP56-interacting | 8573 |
| | factor | |
| P07814_C744 | EPRS Bifunctional | 8574 |
| | glutamate/proline--tRNA | |
| | ligase | |
| Q9UKT9_C434 | IKZF3 Zinc finger protein | 8575 |
| | Aiolos | |
| Q8TC07_C197 | TBC1D15 TBC1 domain | 8576 |
| | family member 15 | |
| Q96RU3_C511 | FNBP1 Formin-binding | 8577 |
| | protein 1 | |
| Q9NUP9_C47 | LIN7C Protein lin-7 homolog | 8578 |
| | C | |
| Q9ULP9_C89 | TBC1D24 TBC1 domain | 8579 |
| | family member 24 | |
| H3BQ06_C89 | Uncharacterized protein | 8580 |
| P28702_C340 | RXRB Retinoic acid receptor | 8581 |
| | RXR-beta | |
| Q9UL15_C327 | BAG5 BAG family molecular | 8582 |
| | chaperone regulator 5 | |
| O95817_C179 | BAG3 BAG family molecular | 8583 |
| | chaperone regulator 3 | |
| Q86UT6_C331 | NLRX1 NLR family member | 8584 |
| | X1 | |
| Q96PE3_C854 | INPP4A Type I inositol 3,4- | 8585 |
| | bisphosphate 4-phosphatase | |
| P57764_C268 | GSDMD Gasdermin-D | 8586 |
| Q99873_C109 | PRMT1 Protein arginine N- | 8587 |
| | methyltransferase 1 | |
| P49589_C27 | CARS Cysteine--tRNA ligase, | 8588 |
| | cytoplasmic | |
| P53384_C31 | NUBP1 Cytosolic Fe—S cluster | 8589 |
| | assembly factor NUBP1 | |
| O95644_C228 | NFATC1 Nuclear factor of | 8590 |
| | activated T-cells, cytoplasmic | |
| | 1 | |
| Q9UPN7_C795 | PPP6R1 Serine/threonine- | 8591 |
| | protein phosphatase 6 | |
| | regulatory | |
| Q93008_C673 | USP9X Probable ubiquitin | 8592 |
| | carboxyl-terminal hydrolase | |
| | FAF | |
| O00507_C674 | USP9Y Probable ubiquitin | 8593 |
| | carboxyl-terminal hydrolase | |
| | FAF | |
| Q9UHI6_C577 | DDX20 Probable ATP- | 8594 |
| | dependent RNA helicase | |
| | DDX20 | |
| Q09666_C108 | AHNAK Neuroblast | 8595 |
| | differentiation-associated | |
| | protein AHNA | |
| O43290_C674 | SART1 U4/U6.U5 tri-snRNP- | 8596 |
| | associated protein 1 | |
| Q2NL82_C126 | TSR1 Pre-rRNA-processing | 8597 |
| | protein TSR1 homolog | |
| Q9UPN3_C4825 | MACF1 Microtubule-actin | 8598 |
| | cross-linking factor 1, | |
| | isoforms | |
| Q13588_C161 | GRAP GRB2-related adapter | 8599 |
| | protein | |
| Q9UG22_C227 | GIMAP2 GTPase IMAP | 8600 |
| | family member 2 | |
| I3L420_C73 | LSM14A Protein LSM14 | 8601 |
| | homolog A | |
| Q8ND56_C78 | LSM14A Protein LSM14 | 8602 |
| | homolog A | |
| Q96CM8_C64 | ACSF2 Acyl-CoA synthetase | 8603 |
| | family member 2, | |
| | mitochondrial | |
| Q6Y7W6_C938 | GIGYF2 PERQ amino acid- | 8604 |
| | rich with GYF domain- | |
| | containing protein | |
| Q9HB58_C327 | SP110 Sp110 nuclear body | 8605 |
| | protein | |
| Q9UGP4_C374 | LIMD1 LIM domain- | 8606 |
| | containing protein 1 | |
| P49458_C48 | SRP9 Signal recognition | 8607 |
| | particle 9 kDa protein | |
| O43566_C496 | RGS14 Regulator of G-protein | 8608 |
| | signaling 14 | |
| P21333_C717 | FLNA Filamin-A | 8609 |
| Q9NZB2_C279 | FAM120A Constitutive | 8610 |
| | coactivator of PPAR-gamma- | |
| | like protein 1 | |
| Q96EB1_C218 | ELP4 Elongator complex | 8611 |
| | protein 4 | |
| O43149_C2312 | ZZEF1 Zinc finger ZZ-type | 8612 |
| | and EF-hand domain- | |
| | containing | |
| Q0VD83_C844 | APOBR Apolipoprotein B | 8613 |
| | receptor | |
| Q00537_C127 | CDK17 Cyclin-dependent | 8614 |
| | kinase 17 | |
| Q9UJY4_C429 | GGA2 ADP-ribosylation | 8615 |
| | factor-binding protein GGA2 | |
| Q03519_C641 | TAP2 Antigen peptide | 8616 |
| | transporter 2 | |
| Q9P2X3_C195 | IMPACT Protein IMPACT | 8617 |
| P42166_C684 | TMPO Lamina-associated | 8618 |
| | polypeptide 2, isoform alpha | |
| Q5GLZ8_C392 | HERC4 Probable E3 | 8619 |
| | ubiquitin-protein ligase | |
| | HERC4 | |
| Q9H832_C100 | UBE2Z Ubiquitin-conjugating | 8620 |
| | enzyme E2 Z | |
| P36969_C93 | GPX4 Phospholipid | 8621 |
| | hydroperoxide glutathione | |
| | peroxidase, mitochondrial | |
| Q9NVG8_C36 | TBC1D13 TBC1 domain | 8622 |
| | family member 13 | |
| O75348_C69 | ATP6V1G1 V-type proton | 8623 |
| | ATPase subunit G 1 | |
| Q99575_C705 | POP1 Ribonucleases P/MRP | 8624 |
| | protein subunit POP1 | |
| O75369_C2501 | FLNB Filamin-B | 8625 |
| P50851_C2675 | LRBA Lipopolysaccharide- | 8626 |
| | responsive and beige-like | |
| | anchor protein | |
| Q99575_C706 | POP1 Ribonucleases P/MRP | 8627 |
| | protein subunit POP1 | |
| Q99704_C115 | DOK1 Docking protein 1 | 8628 |
| Q05086_C108 | UBE3A Ubiquitin-protein | 8629 |
| | ligase E3A | |
| Q15052_C553 | ARHGEF6 Rho guanine | 8630 |
| | nucleotide exchange factor 6 | |
| Q9C0B7_C286 | TMCO7 Transmembrane and | 8631 |
| | coiled-coil domain-containing | |
| | protein | |
| Q9Y2X7_C576 | GIT1 ARF GTPase-activating | 8632 |
| | protein GIT1 | |
| Q66PJ3_C349 | ARL6IP4 ADP-ribosylation | 8633 |
| | factor-like protein 6- | |
| | interacting protein 4 | |
| Q99497_C46 | PARK7 Protein DJ-1 | 8634 |
| Q9UIS9_C525 | MBD1 Methyl-CpG-binding | 8635 |
| | domain protein 1 | |
| Q8IWX8_C69 | CHERP Calcium homeostasis | 8636 |
| | endoplasmic reticulum protein | |
| Q00577_C292 | PURA Transcriptional | 8637 |
| | activator protein Pur-alpha | |
| P62249_C25 | RPS16 40S ribosomal protein | 8638 |
| | S16 | |
| Q9UJX3_C131 | ANAPC7 Anaphase- | 8639 |
| | promoting complex subunit 7 | |
| Q5VTL8_C113 | PRPF38B Pre-mRNA-splicing | 8640 |
| | factor 38B | |
| P47756_C206 | CAPZB F-actin-capping | 8641 |
| | protein subunit beta | |
| Q562E7_C198 | WDR81 WD repeat-containing | 8642 |
| | protein 81 | |
| Q8IV50_C106 | LYSMD2 LysM and putative | 8643 |
| | peptidoglycan-binding | |
| | domain-containing 2 | |
| Q96F15_C171 | GIMAP5 GTPase IMAP | 8644 |
| | family member 5 | |
| Q9P253_C22 | VPS18 Vacuolar protein | 8645 |
| | sorting-associated protein 18 | |
| | homolog | |
| Q562E7_C187 | WDR81 WD repeat-containing | 8646 |
| | protein 81 | |
| Q6KC79_C419 | NIPBL Nipped-B-like protein | 8647 |
| Q9BSJ8_C635 | ESYT1 Extended | 8648 |
| | synaptotagmin-1 | |
| Q14980_C160 | NUMA1 Nuclear mitotic | 8649 |
| | apparatus protein 1 | |
| O00571_C128 | DDX3X ATP-dependent RNA | 8650 |
| | helicase DDX3X | |
| Q96FZ5_C12 | CMTM7 CKLF-like | 8651 |
| | MARVEL transmembrane | |
| | domain-containing protein | |
| Q8TCU6_C52 | PREX1 Phosphatidylinositol | 8652 |
| | 3,4,5-trisphosphate-dependent | |
| Q9Y6K9_C131 | IKBKG NF-kappa-B essential | 8653 |
| | modulator | |
| O14497_C1968 | ARID1A AT-rich interactive | 8654 |
| | domain-containing protein 1A | |
| Q9NYF8_C688 | BCLAF1 Bcl-2-associated | 8655 |
| | transcription factor 1 | |
| Q96SK2_C301 | TMEM209 Transmembrane | 8656 |
| | protein 209 | |
| Q15424_C519 | SAFB Scaffold attachment | 8657 |
| | factor B1 | |
| P52564_C38 | MAP2K6 Dual specificity | 8658 |
| | mitogen-activated protein | |
| | kinase | |
| P08575_C398 | PTPRC Receptor-type | 8659 |
| | tyrosine-protein phosphatase C | |
| Q9NUW8_C135 | TDP1 Tyrosyl-DNA | 8660 |
| | phosphodiesterase 1 | |
| E9PMF8_C332 | PTPRC Receptor-type | 8661 |
| | tyrosine-protein phosphatase C | |
| Q9Y4W2_C140 | LAS1L Ribosomal biogenesis | 8662 |
| | protein LAS1L | |
| P04843_C477 | RPN1 Dolichyl- | 8663 |
| | diphosphooligosaccharide-- | |
| | protein glycosyltransferase | |
| | subunit 1 | |
| Q9UFC0_C249 | LRWD1 Leucine-rich repeat | 8664 |
| | and WD repeat-containing | |
| | protein | |
| Q9NUW8_C48 | TDP1 Tyrosyl-DNA | 8665 |
| | phosphodiesterase 1 | |
| Q15052_C564 | ARHGEF6 Rho guanine | 8666 |
| | nucleotide exchange factor 6 | |
| Q02543_C22 | RPL18A 60S ribosomal | 8667 |
| | protein L18a | |
| A0FGR8_C181 | ESYT2 Extended | 8668 |
| | synaptotagmin-2 | |
| Q9BTA9_C553 | WAC WW domain-containing | 8669 |
| | adapter protein with coiled- | |
| | coil | |
| Q14980_C961 | NUMA1 Nuclear mitotic | 8670 |
| | apparatus protein 1 | |
| Q9BUH6_C180 | C9orf142 Uncharacterized | 8671 |
| | protein C9orf142 | |
| P43250_C138 | GRK6 G protein-coupled | 8672 |
| | receptor kinase 6 | |
| Q15185_C58 | PTGES3 Prostaglandin E | 8673 |
| | synthase 3 | |
| Q8N4N3_C523 | KLHL36 Kelch-like protein 36 | 8674 |
| Q15669_C165 | RHOH Rho-related GTP- | 8675 |
| | binding protein RhoH | |
| Q9NZT2_C443 | OGFR Opioid growth factor | 8676 |
| | receptor | |
| Q13542_C35 | EIF4EBP2 Eukaryotic | 8677 |
| | translation initiation factor 4E- | |
| | binding protein 2 | |
| Q15669_C108 | RHOH Rho-related GTP- | 8678 |
| | binding protein RhoH | |
| Q92835_C138 | INPP5D Phosphatidylinositol | 8679 |
| | 3,4,5-trisphosphate 5- | |
| | phosphatase | |
| Q6PKG0_C864 | LARP1 La-related protein 1 | 8680 |
| Q9Y679_C391 | AUP1 Ancient ubiquitous | 8681 |
| | protein 1 | |
| P36542_C103 | ATP5C1 ATP synthase | 8682 |
| | subunit gamma, mitochondrial | |
| Q01664_C29 | TFAP4 Transcription factor | 8683 |
| | AP-4 | |
| P38606_C138 | ATP6V1A V-type proton | 8684 |
| | ATPase catalytic subunit A | |
| Q9Y520_C223 | PRRC2C Protein PRRC2C | 8685 |
| Q7Z2Z2_C474 | EFTUD1 Elongation factor Tu | 8686 |
| | GTP-binding domain- | |
| | containing | |
| O15294_C758 | OGT UDP-N- | 8687 |
| | acetylglucosamine--peptide N- | |
| | acetylglucosaminyl transferase | |
| Q96S59_C638 | RANBP9 Ran-binding protein | 8688 |
| | 9 | |
| O00541_C272 | PES1 Pescadillo homolog | 8689 |
| Q15020_C670 | SART3 Squamous cell | 8690 |
| | carcinoma antigen recognized | |
| | by T-cells 3 | |
| Q8NF91_C8703 | SYNE1 Nesprin-1 | 8691 |
| Q14966_C1279 | ZNF638 Zinc finger protein | 8692 |
| | 638 | |
| Q96C19_C172 | EFHD2 EF-hand domain- | 8693 |
| | containing protein D2 | |
| O75688_C172 | PPM1B Protein phosphatase | 8694 |
| | 1B | |
| Q05519_C455 | SRSF11 Serine/arginine-rich | 8695 |
| | splicing factor 11 | |
| P42331_C448 | ARHGAP25 Rho GTPase- | 8696 |
| | activating protein 25 | |
| P57075_C371 | UBASH3A Ubiquitin- | 8697 |
| | associated and SH3 domain- | |
| | containing protein | |
| Q96GX2_C75 | ATXN7L3B Putative ataxin-7- | 8698 |
| | like protein 3B | |
| Q14690_C361 | PDCD11 Protein RRP5 | 8699 |
| | homolog | |
| Q15149_C4494 | PLEC Plectin | 8700 |
| Q9NP31_C34 | SH2D2A SH2 domain- | 8701 |
| | containing protein 2A | |
| P30519_C282 | HMOX2 Heme oxygenase 2 | 8702 |
| P98171_C855 | ARHGAP4 Rho GTPase- | 8703 |
| | activating protein 4 | |
| I3L420_C80 | LSM14A Protein LSM14 | 8704 |
| | homolog A | |
| Q8ND56_C85 | LSM14A Protein LSM14 | 8705 |
| | homolog A | |
| P21580_C590 | TNFAIP3 Tumor necrosis | 8706 |
| | factor alpha-induced protein 3 | |
| O14618_C244 | CCS Copper chaperone for | 8707 |
| | superoxide dismutase | |
| Q06124_C573 | PTPN11 Tyrosine-protein | 8708 |
| | phosphatase non-receptor type | |
| | 11 | |
| P08240_C253 | SRPR Signal recognition | 8709 |
| | particle receptor subunit alpha | |
| O14618_C246 | CCS Copper chaperone for | 8710 |
| | superoxide dismutase | |
| Q9H2M9_C67 | RAB3GAP2 Rab3 GTPase- | 8711 |
| | activating protein non-catalytic | |
| | subunit | |
| Q06124_C567 | PTPN11 Tyrosine-protein | 8712 |
| | phosphatase non-receptor type | |
| | 11 | |
| O43865_C272 | AHCYL1 Putative | 8713 |
| | adenosylhomocysteinase 2 | |
| Q96HN2_C353 | AHCYL2 Putative | 8714 |
| | adenosylhomocysteinase 3 | |
| P41226_C599 | UBA7 Ubiquitin-like | 8715 |
| | modifier-activating enzyme 7 | |
| Q06203_C100 | PPAT | 8716 |
| | Amidophosphoribosyltransferase | |
| Q96F07_C98 | CYFIP2 Cytoplasmic FMR1- | 8717 |
| | interacting protein 2 | |
| O60610_C1227 | DIAPH1 Protein diaphanous | 8718 |
| | homolog 1 | |
| Q9Y266_C188 | NUDC Nuclear migration | 8719 |
| | protein nudC | |
| Q7L576_C98 | CYFIP1 Cytoplasmic FMR1- | 8720 |
| | interacting protein 1 | |
| Q9H5N1_C422 | RABEP2 Rab GTPase-binding | 8721 |
| | effector protein 2 | |
| Q9H5N1_C423 | RABEP2 Rab GTPase-binding | 8722 |
| | effector protein 2 | |
| Q13501_C289 | SQSTM1 Sequestosome-1 | 8723 |
| Q02446_C55 | SP4 Transcription factor Sp4 | 8724 |
| O43175_C369 | PHGDH D-3- | 8725 |
| | phosphoglycerate | |
| | dehydrogenase | |
| Q93008_C1237 | USP9X Probable ubiquitin | 8726 |
| | carboxyl-terminal hydrolase | |
| | FAF | |
| O00507_C1238 | USP9Y Probable ubiquitin | 8727 |
| | carboxyl-terminal hydrolase | |
| | FAF | |
| Q8TD19_C11 | NEK9 Serine/threonine- | 8728 |
| | protein kinase Nek9 | |
| Q6ZRI6_C367 | C15orf39 Uncharacterized | 8729 |
| | protein C15orf39 | |
| P40763_C718 | STAT3 Signal transducer and | 8730 |
| | activator of transcription 3 | |
| Q15723_C470 | ELF2 ETS-related | 8731 |
| | transcription factor Elf-2 | |
| Q8IWZ3_C615 | ANKHD1 Ankyrin repeat and | 8732 |
| | KH domain-containing protein | |
| | 1 | |
| O60664_C60 | PLIN3 Perilipin-3 | 8733 |
| Q09666_C5502 | AHNAK Neuroblast | 8734 |
| | differentiation-associated | |
| | protein AHNA | |
| Q8IV63_C191 | VRK3 Inactive | 8735 |
| | serine/threonine-protein kinase | |
| | VRK3 | |
| E7EQZ4_C146 | SMN1 Survival motor neuron | 8736 |
| | protein | |
| Q16637_C146 | SMN2 Survival motor neuron | 8737 |
| | protein | |
| Q8IWV7_C1603 | UBR1 E3 ubiquitin-protein | 8738 |
| | ligase UBR1 | |
| O14981_C936 | BTAF1 TATA-binding | 8739 |
| | protein-associated factor 172 | |
| Q07352_C34 | ZEP36L1 Zinc finger protein | 8740 |
| | 36, C3H1 type-like 1 | |
| P25205_C119 | MCM3 DNA replication | 8741 |
| | licensing factor MCM3 | |
| P35579_C1437 | MYH9 Myosin-9 | 8742 |
| Q8NF50_C2091 | DOCK8 Dedicator of | 8743 |
| | cytokinesis protein 8 | |
| P42224_C492 | STAT1 Signal transducer and | 8744 |
| | activator of transcription 1 | |
| O96008_C74 | TOMM40 Mitochondrial | 8745 |
| | import receptor subunit | |
| | TOM40 homolog | |
| O96008_C76 | TOMM40 Mitochondrial | 8746 |
| | import receptor subunit | |
| | TOM40 homolog | |
| P46063_C606 | RECQL ATP-dependent DNA | 8747 |
| | helicase Q1 | |
| Q9NVE7_C537 | PANK4 Pantothenate kinase 4 | 8748 |
| O15371_C195 | E1F3D Eukaryotic translation | 8749 |
| | initiation factor 3 subunit | |
| P45880_C47 | VDAC2 Voltage-dependent | 8750 |
| | anion-selective channel protein | |
| Q8IZ07_C540 | ANKRD13A Ankyrin repeat | 8751 |
| | domain-containing protein | |
| | 13A | |
| P49795_C73 | RGS19 Regulator of G-protein | 8752 |
| | signaling 19 | |
| P49795_C76 | RGS19 Regulator of G-protein | 8753 |
| | signaling 19 | |
| Q69YN2_C288 | CWF19L1 CWF19-like | 8754 |
| | protein 1 | |
| Q53ET0_C515 | CRTC2 CREB-regulated | 8755 |
| | transcription coactivator 2 | |
| P78371_C412 | CCT2 T-complex protein 1 | 8756 |
| | subunit beta | |
| Q99961_C277 | SH3GL1 Endophilin-A2 | 8757 |
| P33241_C36 | LSP1 Lymphocyte-specific | 8758 |
| | protein 1 | |
| Q8NFI3_C113 | ENGASE Cytosolic endo- | 8759 |
| | beta-N-acetylglucosaminidase | |
| Q9BXJ9_C238 | NAA15 N-alpha- | 8760 |
| | acetyltransferase 15, NatA | |
| | auxiliary subunit | |
| Q92570_C301 | NR4A3 Nuclear receptor | 8761 |
| | subfamily 4 group A member | |
| | 3 | |
| I3L097_C251 | Uncharacterized protein | 8762 |
| Q9H6R4_C1034 | NOL6 Nucleolar protein 6 | 8763 |
| O94992_C79 | HEXIM1 Protein HEXIM1 | 8764 |
| Q8N0X7_C504 | SPG20 Spartin | 8765 |
| O94992_C84 | HEXIM1 Protein HEXIM1 | 8766 |
| Q96HE7_C166 | ERO1L ERO1-like protein | 8767 |
| | alpha | |
| Q9GZU8_C187 | FAM192A Protein FAM192A | 8768 |
| Q9UKA4_C1232 | AKAP11 A-kinase anchor | 8769 |
| | protein 11 | |
| P42224_C155 | STAT1 Signal transducer and | 8770 |
| | activator of transcription 1 | |
| P42166_C280 | TMPO Lamina-associated | 8771 |
| | polypeptide 2, isoform alpha | |
| I3L1I5_C129 | Uncharacterized protein | 8772 |
| Q15052_C25 | ARHGEF6 Rho guanine | 8773 |
| | nucleotide exchange factor 6 | |
| O95267_C615 | RASGRP1 RAS guanyl- | 8774 |
| | releasing protein 1 | |
| Q9P258_C428 | RCC2 Protein RCC2 | 8775 |
| Q7L1Q6_C35 | BZW1 Basic leucine zipper | 8776 |
| | and W2 domain-containing | |
| | protein | |
| Q63HN8_C1510 | RNF213 E3 ubiquitin-protein | 8777 |
| | ligase RNF213 | |
| Q9Y2X3_C439 | NOP58 Nucleolar protein 58 | 8778 |
| P53384_C25 | NUBP1 Cytosolic Fe—S cluster | 8779 |
| | assembly factor NUBP1 | |
| O15054_C1205 | KDM6B Lysine-specific | 8780 |
| | demethylase 6B | |
| Q96BY6_C321 | DOCK10 Dedicator of | 8781 |
| | cytokinesis protein 10 | |
| Q96BY6_C319 | DOCK10 Dedicator of | 8782 |
| | cytokinesis protein 10 | |
| P01892_C363 | HLA-A HLA class I histocompatibility | 8783 |
| | antigen, A-2 alpha | |
| P01891_C363 | HLA-A HLA class I histocompatibility | 8784 |
| | antigen, A-68 alpha | |
| P49327_C1448 | FASN Fatty acid synthase | 8785 |
| Q8ND24_C655 | RNF214 RING finger protein | 8786 |
| | 214 | |
| Q9P2E3_C1822 | ZNFX1 NFX1-type zinc | 8787 |
| | finger-containing protein 1 | |
| Q9Y5K6_C540 | CD2AP CD2-associated | 8788 |
| | protein | |
| Q13459_C1279 | MYO9B Unconventional | 8789 |
| | myosin-IXb | |
| O15355_C241 | PPM1G Protein phosphatase | 8790 |
| | 1G | |
| Q8IV53_C174 | DENND1C DENN domain- | 8791 |
| | containing protein 1C | |
| Q6JBY9_C181 | RCSD1 CapZ-interacting | 8792 |
| | protein | |
| Q8IU85_C354 | CAMK1D | 8793 |
| | Calcium/calmodulin- | |
| | dependent protein kinase type | |
| | 1 | |
| O95644_C209 | NFATC1 Nuclear factor of | 8794 |
| | activated T-cells, cytoplasmic | |
| | 1 | |
| Q92576_C885 | PHF3 PHD finger protein 3 | 8795 |
| Q5T440_C170 | IBA57 Putative transferase | 8796 |
| | CAF17, mitochondrial | |
| P30519_C265 | HMOX2 Heme oxygenase 2 | 8797 |
| Q86UP2_C1105 | KTN1 Kinectin | 8798 |
| O15042_C624 | U2SURP U2 snRNP- | 8799 |
| | associated SURP motif- | |
| | containing protein | |
| Q9NVZ3_C133 | NECAP2 Adaptin ear-binding | 8800 |
| | coat-associated protein 2 | |
| P26651_C253 | ZFP36 Tristetraprolin | 8801 |
| Q5TFE4_C119 | NT5DC1 5-nucleotidase | 8802 |
| | domain-containing protein 1 | |
| Q9BRP1_C278 | PDCD2L Programmed cell | 8803 |
| | death protein 2-like | |
| Q9H410_C287 | DSN1 Kinetochore-associated | 8804 |
| | protein DSN1 homolog | |
| P27986_C146 | PIK3R1 Phosphatidylinositol | 8805 |
| | 3-kinase regulatory subunit | |
| | alpha | |
| P10144_C142 | GZMB Granzyme B | 8806 |
| Q9UKF6_C498 | CPSF3 Cleavage and | 8807 |
| | polyadenylation specificity | |
| | factor subunit | |
| P55265_C1224 | ADAR Double-stranded RNA- | 8808 |
| | specific adenosine deaminase | |
| Q9NXV6_C516 | CDKN2AIP CDKN2A- | 8809 |
| | interacting protein | |
| Q7Z401_C1289 | DENND4A C-myc promoter- | 8810 |
| | binding protein | |
| Q9NVT9_C69 | ARMC1 Armadillo repeat- | 8811 |
| | containing protein 1 | |
| Q9GZR7_C832 | DDX24 ATP-dependent RNA | 8812 |
| | helicase DDX24 | |
| Q2TAA2_C137 | IAH1 Isoamyl acetate- | 8813 |
| | hydrolyzing esterase 1 | |
| | homolog | |
| Q2TAA2_C150 | IAH1 Isoamyl acetate- | 8814 |
| | hydrolyzing esterase 1 | |
| | homolog | |
| Q2TAA2_C145 | IAH1 Isoamyl acetate- | 8815 |
| | hydrolyzing esterase 1 | |
| | homolog | |
| Q13315_C384 | ATM Serine-protein kinase | 8816 |
| | ATM | |
| Q9BXJ9_C721 | NAA15 N-alpha- | 8817 |
| | acetyltransferase 15, NatA | |
| | auxiliary subunit | |
| Q8TD19_C623 | NEK9 Serine/threonine- | 8818 |
| | protein kinase Nek9 | |
| P50749_C251 | RASSF2 Ras association | 8819 |
| | domain-containing protein 2 | |
| Q92831_C690 | KAT2B Histone | 8820 |
| | acetyltransferase KAT2B | |
| Q92830_C695 | KAT2A Histone | 8821 |
| | acetyltransferase KAT2A | |
| P11216_C437 | PYGB Glycogen | 8822 |
| | phosphorylase, brain form | |
| P30044_C100 | PRDX5 Peroxiredoxin-5, | 8823 |
| | mitochondrial | |
| Q9Y3T9_C585 | NOC2L Nucleolar complex | 8824 |
| | protein 2 homolog | |
| Q9NVG8_C387 | TBC1D13 TBC1 domain | 8825 |
| | family member 13 | |
| O14933_C102 | UBE2L6 Ubiquitin/ISG15- | 8826 |
| | conjugating enzyme E2 L6 | |
| Q9UNE7_C199 | STUB1 E3 ubiquitin-protein | 8827 |
| | ligase CHIP | |
| Q9UKA4_C1257 | AKAP11 A-kinase anchor | 8828 |
| | protein 11 | |
| Q8TCU6_C37 | PREX1 Phosphatidylinositol | 8829 |
| | 3,4,5-trisphosphate-dependent | |
| P54274_C118 | TERF1 Telomeric repeat- | 8830 |
| | binding factor 1 | |
| P11161_C469 | EGR2 E3 SUMO-protein | 8831 |
| | ligase EGR2 | |
| P11161_C454 | EGR2 E3 SUMO-protein | 8832 |
| | ligase EGR2 | |
| Q8TAQ2_C145 | SMARCC2 SWI/SNF | 8833 |
| | complex subunit SMARCC2 | |
| Q13232_C158 | NME3 Nucleoside | 8834 |
| | diphosphate kinase 3 | |
| Q9NXV6_C178 | CDKN2AIP CDKN2A- | 8835 |
| | interacting protein | |
| P01106_C25 | MYC Myc proto-oncogene | 8836 |
| | protein | |
| Q6L8Q7_C108 | PDE12 2,5-phosphodiesterase | 8837 |
| | 12 | |
| Q6L8Q7_C119 | PDE12 2,5-phosphodiesterase | 8838 |
| | 12 | |
| P45880_C210 | VDAC2 Voltage-dependent | 8839 |
| | anion-selective channel protein | |
| B0V043_C41 | VARS Valyl-tRNA synthetase | 8840 |
| P45880_C227 | VDAC2 Voltage-dependent | 8841 |
| | anion-selective channel protein | |
| Q9BU23_C696 | LMF2 Lipase maturation | 8842 |
| | factor 2 | |
| Q8NDX1_C435 | PSD4 PH and SEC7 domain- | 8843 |
| | containing protein 4 | |
| Q9Y4B6_C784 | VPRBP Protein VPRBP | 8844 |
| Q8IY21_C1051 | DDX60 Probable ATP- | 8845 |
| | dependent RNA helicase | |
| | DDX60 | |
| O94829_C217 | IPO13 Importin-13 | 8846 |
| Q92835_C1088 | INPP5D Phosphatidylinositol | 8847 |
| | 3,4,5-trisphosphate 5- | |
| | phosphatase | |
| P01106_C70 | MYC Myc proto-oncogene | 8848 |
| | protein | |
| Q99829_C53 | CPNE1 Copine-1 | 8849 |
| Q9Y2S2_C125 | CRYL1 Lambda-crystallin | 8850 |
| | homolog | |
| Q14289_C562 | PTK2B Protein-tyrosine | 8851 |
| | kinase 2-beta | |
| P41240_C290 | CSK Tyrosine-protein kinase | 8852 |
| | CSK | |
| Q01826_C529 | SATB1 DNA-binding protein | 8853 |
| | SATB1 | |
| Q9UPW6_C518 | SATB2 DNA-binding protein | 8854 |
| | SATB2 | |
| Q9GZT9_C127 | EGLN1 Egl nine homolog 1 | 8855 |
| Q99590_C553 | SCAF11 Protein SCAF11 | 8856 |
| Q13077_C37 | TRAF1 TNF receptor- | 8857 |
| | associated factor 1 | |
| Q13077_C38 | TRAF1 TNF receptor- | 8858 |
| | associated factor 1 | |
| O95352_C524 | ATG7 Ubiquitin-like modifier- | 8859 |
| | activating enzyme ATG7 | |
| Q63HN8_C62 | RNF213 E3 ubiquitin-protein | 8860 |
| | ligase RNF213 | |
| Q63HN8_C78 | RNF213 E3 ubiquitin-protein | 8861 |
| | ligase RNF213 | |
| E9PPU0_C1888 | EPPK1 Epiplakin | 8862 |
| Q63HN8_C4258 | RNF213 E3 ubiquitin-protein | 8863 |
| | ligase RNF213 | |
| Q9UKX7_C151 | NUP50 Nuclear pore complex | 8864 |
| | protein Nup50 | |
| P45880_C76 | VDAC2 Voltage-dependent | 8865 |
| | anion-selective channel protein | |
| Q6NYC8_C397 | PPP1R18 Phostensin | 8866 |
| Q6NYC8_C396 | PPP1R18 Phostensin | 8867 |
| Q9ULV4_C420 | CORO1C Coronin-1C | 8868 |
| Q96I15_C22 | SCLY Selenocysteine lyase | 8869 |
| Q8WXH0_C553 | SYNE2 Nesprin-2 | 8870 |
| Q9Y277_C36 | VDAC3 Voltage-dependent | 8871 |
| | anion-selective channel protein | |
| P31153_C104 | MAT2A S- | 8872 |
| | adenosylmethionine synthase | |
| | isoform type-2 | |
| Q14005_C1004 | IL16 Pro-interleukin-16 | 8873 |
| Q16548_C19 | BCL2A1 Bcl-2-related protein | 8874 |
| | A1 | |
| P18583_C92 | SON Protein SON | 8875 |
| P31153_C56 | MAT2A S- | 8876 |
| | adenosylmethionine synthase | |
| | isoform type-2 | |
| Q04759_C14 | PRKCQ Protein kinase C theta | 8877 |
| | type | |
| Q7Z4W1_C244 | DCXR L-xylulose reductase | 8878 |
| Q9Y6C9_C296 | MTCH2 Mitochondrial carrier | 8879 |
| | homolog 2 | |
| Q86YS7_C993 | KIAA0528 Uncharacterized | 8880 |
| | protein KIAA0528 | |
| Q13045_C46 | FLII Protein flightless-1 | 8881 |
| | homolog | |
| Q9UL40_C68 | ZNF346 Zinc finger protein | 8882 |
| | 346 | |
| Q5T4S7_C2554 | UBR4 E3 ubiquitin-protein | 8883 |
| | ligase UBR4 | |
| Q8N0Z8_C292 | PUSL1 tRNA pseudouridine | 8884 |
| | synthase-like 1 | |
| P46109_C249 | CRKL Crk-like protein | 8885 |
| Q96CW5_C194 | TUBGCP3 Gamma-tubulin | 8886 |
| | complex component 3 | |
| P54136_C32 | RARS Arginine--tRNA ligase, | 8887 |
| | cytoplasmic | |
| Q15005_C17 | SPCS2 Signal peptidase | 8888 |
| | complex subunit 2 | |
| Q15306_C194 | IRF4 Interferon regulatory | 8889 |
| | factor 4 | |
| Q96GW9_C425 | MARS2 Methionine--tRNA | 8890 |
| | ligase, mitochondrial | |
| Q02556_C306 | IRF8 Interferon regulatory | 8891 |
| | factor 8 | |
| Q9Y4W2_C456 | LAS1L Ribosomal biogenesis | 8892 |
| | protein LAS1L | |
| Q8TB24_C942 | RIN3 Ras and Rab interactor 3 | 8893 |
| Q96Q11_C373 | TRNT1 CCA tRNA | 8894 |
| | nucleotidyltransferase 1, | |
| | mitochondrial | |
| O00170_C122 | AIP AH receptor-interacting | 8895 |
| | protein | |
| Q7Z2W4_C645 | ZC3HAV1 Zinc finger CCCH- | 8896 |
| | type antiviral protein 1 | |
| O95081_C39 | AGFG2 Arf-GAP domain and | 8897 |
| | FG repeat-containing protein 2 | |
| P11216_C326 | PYGB Glycogen | 8898 |
| | phosphorylase, brain form | |
| Q16548_C55 | BCL2A1 Bcl-2-related protein | 8899 |
| | A1 | |
| Q7Z6Z7_C3372 | HUWE1 E3 ubiquitin-protein | 8900 |
| | ligase HUWE1 | |
| A6NDG6_C297 | PGP Phosphoglycolate | 8901 |
| | phosphatase | |
| O95336_C32 | PGLS 6- | 8902 |
| | phosphogluconolactonase | |
| O14933_C98 | UBE2L6 Ubiquitin/ISG15- | 8903 |
| | conjugating enzyme E2 L6 | |
| P49588_C773 | AARS Alanine--tRNA ligase, | 8904 |
| | cytoplasmic | |
| Q9Y277_C65 | VDAC3 Voltage-dependent | 8905 |
| | anion-selective channel protein | |
| Q6IA69_C428 | NADSYN1 Glutamine- | 8906 |
| | dependent NAD(+) synthetase | |
| Q9Y2W6_C109 | TDRKH Tudor and KH | 8907 |
| | domain-containing protein | |
| Q9NRW3_C130 | APOBEC3C Probable DNA | 8908 |
| | dC- dU-editing enzyme | |
| | APOBEC-3C | |
| P00813_C75 | ADA Adenosine deaminase | 8909 |
| O14920_C464 | IKBKB Inhibitor of nuclear | 8910 |
| | factor kappa-B kinase subunit | |
| Q9NWZ3_C13 | IRAK4 Interleukin-1 receptor- | 8911 |
| | associated kinase 4 | |
| Q13422_C394 | IKZF1 DNA-binding protein | 8912 |
| | Ikaros | |
| Q04759_C17 | PRKCQ Protein kinase C theta | 8913 |
| | type | |
| Q14005_C1011 | IL16 Pro-interleukin-16 | 8914 |
| O75694_C1344 | NUP155 Nuclear pore | 8915 |
| | complex protein Nup155 | |
| Q9BU76_C58 | MMTAG2 Multiple myeloma | 8916 |
| | tumor-associated protein 2 | |
| Q6FI81_C251 | CIAPIN1 Anamorsin | 8917 |
| P54136_C34 | RARS Arginine--tRNA ligase, | 8918 |
| | cytoplasmic | |
| Q3ZCM7_C303 | TUBB8 Tubulin beta-8 chain | 8919 |
| Q3ZCM7_C354 | TUBB8 Tubulin beta-8 chain | 8920 |
| Q13163_C300 | MAP2K5 Dual specificity | 8921 |
| | mitogen-activated protein | |
| | kinase | |
| Q8IZL8_C237 | PELP1 Proline-, glutamic | 8922 |
| | acid- and leucine-rich protein | |
| A0AVT1_C546 | UBA6 Ubiquitin-like | 8923 |
| | modifier-activating enzyme 6 | |
| Q7L2J0_C522 | MEPCE 7SK snRNA | 8924 |
| | methylphosphate capping | |
| | enzyme | |
| Q14657_C23 | LAGE3 L antigen family | 8925 |
| | member 3 | |
| B0I1T2_C979 | MYO1G Unconventional | 8926 |
| | myosin-Ig | |
| P36969_C134 | GPX4 Phospholipid | 8927 |
| | hydroperoxide glutathione | |
| | peroxidase, mitochondrial | |
| Q14149_C15 | MORC3 MORC family CW- | 8928 |
| | type zinc finger protein 3 | |
| P82932_C105 | MRPS6 28S ribosomal protein | 8929 |
| | S6, mitochondrial | |
| Q16666_C637 | IFI16 Gamma-interferon- | 8930 |
| | inducible protein 16 | |
| Q10567_C866 | AP1B1 AP-1 complex subunit | 8931 |
| | beta-1 | |
| Q709C8_C2159 | VPS13C Vacuolar protein | 8932 |
| | sorting-associated protein 13C | |
| Q7Z6Z7_C3375 | HUWE1 E3 ubiquitin-protein | 8933 |
| | ligase HUWE1 | |
| Q7Z6Z7_C3385 | HUWE1 E3 ubiquitin-protein | 8934 |
| | ligase HUWE1 | |
| Q9ULA0_C327 | DNPEP Aspartyl | 8935 |
| | aminopeptidase | |
| P29590_C479 | PML Protein PML | 8936 |
| Q9NRG0_C55 | CHRAC1 Chromatin | 8937 |
| | accessibility complex protein 1 | |
| Q14005_C1016 | IL16 Pro-interleukin-16 | 8938 |
| Q8NCF5_C232 | NFATC2IP NFATC2- | 8939 |
| | interacting protein | |
| Q96QT6_C233 | PHF12 PHD finger protein 12 | 8940 |
| Q29RF7_C532 | PDS5A Sister chromatid | 8941 |
| | cohesion protein PDS5 | |
| | homolog A | |
| Q16254_C88 | E2F4 Transcription factor | 8942 |
| | E2F4 | |
| Q53GL7_C434 | PARP10 Poly | 8943 |
| Q93009_C315 | USP7 Ubiquitin carboxyl- | 8944 |
| | terminal hydrolase 7 | |
| O95931_C102 | CBX7 Chromobox protein | 8945 |
| | homolog 7 | |
| O95931_C107 | CBX7 Chromobox protein | 8946 |
| | homolog 7 | |
| Q5VZ89_C850 | DENND4C DENN domain- | 8947 |
| | containing protein 4C | |
| Q8NF50_C939 | DOCK8 Dedicator of | 8948 |
| | cytokinesis protein 8 | |
| Q7Z3B4_C171 | NUP54 Nucleoporin p54 | 8949 |
| Q6FI81_C249 | CIAPIN1 Anamorsin | 8950 |
| Q92888_C595 | ARHGEF1 Rho guanine | 8951 |
| | nucleotide exchange factor 1 | |
| Q8TDG2_C182 | ACTRT1 Actin-related protein | 8952 |
| | T1 | |
| O60216_C78 | RAD21 Double-strand-break | 8953 |
| | repair protein rad21 homolog | |
| Q9UPN6_C102 | SCAF8 Protein SCAF8 | 8954 |
| Q9NVC6_C649 | MED17 Mediator of RNA | 8955 |
| | polymerase II transcription | |
| | subunit 17 | |
| P35579_C816 | MYH9 Myosin-9 | 8956 |
| Q9P0J1_C149 | PDP1 | 8957 |
| O95602_C613 | POLR1A DNA-directed RNA | 8958 |
| | polymerase I subunit RPA1 | |
| Q8IZL8_C536 | PELP1 Proline-, glutamic | 8959 |
| | acid- and leucine-rich protein | |
| P42331_C154 | ARHGAP25 Rho GTPase- | 8960 |
| | activating protein 25 | |
| P78527_C3837 | PRKDC DNA-dependent | 8961 |
| | protein kinase catalytic subunit | |
| P61978_C185 | HNRNPK Heterogeneous | 8962 |
| | nuclear ribonucleoprotein K | |
| P51610_C352 | HCFC1 Host cell factor 1 | 8963 |
| J3QR44_C422 | CDK11B Cyclin-dependent | 8964 |
| | kinase 11B | |
| P21127_C432 | CDK11B Cyclin-dependent | 8965 |
| | kinase 11B | |
| Q01082_C183 | SPTBN1 Spectrin beta chain, | 8966 |
| | non-erythrocytic 1 | |
| P05771_C502 | PRKCB Protein kinase C beta | 8967 |
| | type | |
| Q9NYQ6_C1840 | CELSR1 Cadherin EGF LAG | 8968 |
| | seven-pass G-type receptor 1 | |
| Q8NBU5_C137 | ATAD1 ATPase family AAA | 8969 |
| | domain-containing protein 1 | |
| Q9BXL7_C539 | CARD11 Caspase recruitment | 8970 |
| | domain-containing protein 11 | |
| Q6PCE3_C303 | PGM2L1 Glucose 1,6- | 8971 |
| | bisphosphate synthase | |
| Q9BTE3_C287 | MCMBP Mini-chromosome | 8972 |
| | maintenance complex-binding | |
| | protein | |
| Q9NTM9_C248 | CUTC Copper homeostasis | 8973 |
| | protein cutC homolog | |
| Q9Y4P1_C74 | ATG4B Cysteine protease | 8974 |
| | ATG4B | |
| P21580_C657 | TNFAIP3 Tumor necrosis | 8975 |
| | factor alpha-induced protein 3 | |
| O43149_C2546 | ZZEF1 Zinc finger ZZ-type | 8976 |
| | and EF-hand domain- | |
| | containing 1 | |
| Q8NHV1_C195 | GIMAP7 GTPase IMAP | 8977 |
| | family member 7 | |
| Q14644_C206 | RASA3 Ras GTPase- | 8978 |
| | activating protein 3 | |
| Q99567_C608 | NUP88 Nuclear pore complex | 8979 |
| | protein Nup88 | |
| P08311_C142 | CTSG Cathepsin G | 8980 |
| O60256_C31 | PRPSAP2 Phosphoribosyl | 8981 |
| | pyrophosphate synthase- | |
| | associated protein 2 | |
| O95785_C1429 | WIZ Protein Wiz | 8982 |
| O00148_C74 | DDX39A ATP-dependent | 8983 |
| | RNA helicase DDX39A | |
| O00148_C86 | DDX39A ATP-dependent | 8984 |
| | RNA helicase DDX39A | |
| Q9H4E7_C266 | DEF6 Differentially expressed | 8985 |
| | in FDCP 6 homolog | |
| P31949_C91 | S100A11 Protein S100-A11 | 8986 |
| P18206_C85 | VCL Vinculin | 8987 |
| P12931_C280 | SRC Proto-oncogene tyrosine- | 8988 |
| | protein kinase Src | |
| Q9UK61_C830 | FAM208A Protein FAM208A | 8989 |
| P19838_C925 | NFKB1 Nuclear factor NF- | 8990 |
| | kappa-B p105 subunit | |
| Q15418_C432 | RPS6KA1 Ribosomal protein | 8991 |
| | S6 kinase alpha-1 | |
| P17987_C397 | TCP1 T-complex protein 1 | 8992 |
| | subunit alpha | |
| P30566_C483 | ADSL Adenylosuccinate lyase | 8993 |
| Q96FV9_C49 | THOC1 THO complex subunit | 8994 |
| | 1 | |
| Q9H9Y6_C1061 | POLR1B DNA-directed RNA | 8995 |
| | polymerase I subunit RPA2 | |
| Q9UN37_C403 | VPS4A Vacuolar protein | 8996 |
| | sorting-associated protein 4A | |
| Q49A26_C303 | GLYR1 Putative | 8997 |
| | oxidoreductase GLYR1 | |
| P49591_C300 | SARS Serine--tRNA ligase, | 8998 |
| | cytoplasmic | |
| P78371_C289 | CCT2 T-complex protein 1 | 8999 |
| | subunit beta | |
| P55786_C265 | NPEPPS Puromycin-sensitive | 9000 |
| | aminopeptidase | |
| Q9Y314_C185 | NOSIP Nitric oxide synthase- | 9001 |
| | interacting protein | |
| P30466_C188 | HLA-B HLA class I histocompatibility | 9002 |
| | antigen, B-18 alpha | |
| P30462_C188 | HLA-B HLA class I histocompatibility | 9003 |
| | antigen, B-14 alpha | |
| Q14980_C80 | NUMA1 Nuclear mitotic | 9004 |
| | apparatus protein 1 | |
| P36954_C52 | POLR2I DNA-directed RNA | 9005 |
| | polymerase II subunit RPB9 | |
| O95639_C41 | CPSF4 Cleavage and | 9006 |
| | polyadenylation specificity | |
| | factor subunit | |
| P14618_C49 | PKM Pyruvate kinase | 9007 |
| | isozymes M1/M2 | |
| Q7L4I2_C382 | RSRC2 Arginine/serine-rich | 9008 |
| | coiled-coil protein 2 | |
| A6NHR9_C1899 | SMCHD1 Structural | 9009 |
| | maintenance of chromosomes | |
| | flexible hinge domain | |
| | containing 1 | |
| Q86U90_C99 | YRDC YrdC domain- | 9010 |
| | containing protein, | |
| | mitochondrial | |
| Q86U90_C95 | YRDC YrdC domain- | 9011 |
| | containing protein, | |
| | mitochondrial | |
| Q14839_C1827 | CHD4 Chromodomain- | 9012 |
| | helicase-DNA-binding protein | |
| | 4 | |
| Q92499_C111 | DDX1 ATP-dependent RNA | 9013 |
| | helicase DDX1 | |
| P49411_C222 | TUFM Elongation factor Tu, | 9014 |
| | mitochondrial | |
| P49411_C290 | TUFM Elongation factor Tu, | 9015 |
| | mitochondrial | |
| Q9Y5U2_C99 | TSSC4 Protein TSSC4 | 9016 |
| P49189_C267 | ALDH9A1 4- | 9017 |
| | trimethylaminobutyraldehyde | |
| | dehydrogenase | |
| O75376_C1274 | NCOR1 Nuclear receptor | 9018 |
| | corepressor 1 | |
| P23743_C645 | DGKA Diacylglycerol kinase | 9019 |
| | alpha | |
| P26368_C429 | U2AF2 Splicing factor U2AF | 9020 |
| | 65 kDa subunit | |
| Q01432_C47 | AMPD3 AMP deaminase 3 | 9021 |
| Q9HBH5_C97 | RDH14 Retinol | 9022 |
| | dehydrogenase 14 | |
| Q13576_C276 | IQGAP2 Ras GTPase- | 9023 |
| | activating-like protein | |
| | IQGAP2 | |
| Q9H5V9_C11 | CXorf56 UPF0428 protein | 9024 |
| | CXorf56 | |
| Q9NYK5_C335 | MRPL39 39S ribosomal | 9025 |
| | protein L39, mitochondrial | |
| Q96JM7_C233 | L3MBTL3 Lethal(3)malignant | 9026 |
| | brain tumor-like protein 3 | |
| P20591_C42 | MX1 Interferon-induced GTP- | 9027 |
| | binding protein Mx1 | |
| Q9NVS2_C186 | MRPS18A 28S ribosomal | 9028 |
| | protein S18a, mitochondrial | |
| O15042_C65 | U2SURP U2 snRNP- | 9029 |
| | associated SURP motif- | |
| | containing protein | |
| Q5H9U9_C1031 | DDX60L Probable ATP- | 9030 |
| | dependent RNA helicase | |
| | DDX60-like | |
| Q9Y4A5_C3535 | TRRAP | 9031 |
| | Transformation/transcription | |
| | domain-associated protein | |
| O60313_C801 | OPA1 Dynamin-like 120 kDa | 9032 |
| | protein, mitochondrial | |
| O60759_C246 | CYTIP Cytohesin-interacting | 9033 |
| | protein | |
| P51531_C1296 | SMARCA2 Probable global | 9034 |
| | transcription activator SNF2L2 | |
| P51532_C1359 | SMARCA4 Transcription | 9035 |
| | activator BRG1 | |
| Q6QNY0_C168 | BLOC1S3 Biogenesis of | 9036 |
| | lysosome-related organelles | |
| | complex | |
| P16615_C447 | ATP2A2 | 9037 |
| | Sarcoplasmic/endoplasmic | |
| | reticulum calcium ATPase | |
| Q6PJI9_C654 | WDR59 WD repeat-containing | 9038 |
| | protein 59 | |
| Q99683_C928 | MAP3K5 Mitogen-activated | 9039 |
| | protein kinase kinase kinase 5 | |
| Q99714_C58 | HSD17B10 3-hydroxyacyl- | 9040 |
| | CoA dehydrogenase type-2 | |
| A6NC98_C1222 | CCDC88B Coiled-coil | 9041 |
| | domain-containing protein | |
| | 88B | |
| P78527_C4045 | PRKDC DNA-dependent | 9042 |
| | protein kinase catalytic subunit | |
| Q9C0B1_C171 | FTO Alpha-ketoglutarate- | 9043 |
| | dependent dioxygenase FTO | |
| Q9Y490_C2161 | TLN1 Talin-1 | 9044 |
| P78527_C3403 | PRKDC DNA-dependent | 9045 |
| | protein kinase catalytic subunit | |
| Q9H668_C8 | OBFC1 CST complex subunit | 9046 |
| | STN1 | |
| Q96FS4_C811 | SIPA1 Signal-induced | 9047 |
| | proliferation-associated | |
| | protein 1 | |
| Q8NI27_C1064 | THOC2 THO complex subunit | 9048 |
| | 2 | |
| O15213_C515 | WDR46 WD repeat-containing | 9049 |
| | protein 46 | |
| P48147_C255 | PREP Prolyl endopeptidase | 9050 |
| B5ME19_C753 | EIF3CL Eukaryotic translation | 9051 |
| | initiation factor 3 subunit | |
| Q15118_C71 | PDK1 | 9052 |
| P12081_C509 | HARS Histidine--tRNA ligase, | 9053 |
| | cytoplasmic | |
| O60684_C253 | KPNA6 Importin subunit | 9054 |
| | alpha-7 | |
| Q9BVP2_C234 | GNL3 Guanine nucleotide- | 9055 |
| | binding protein-like 3 | |
| P09326_C148 | CD48 CD48 antigen | 9056 |
| O75663_C14 | TIPRL TIP41-like protein | 9057 |
| Q9Y4W2_C306 | LAS1L Ribosomal biogenesis | 9058 |
| | protein LAS1L | |
| Q92889_C560 | ERCC4 DNA repair | 9059 |
| | endonuclease XPF | |
| Q9Y4F9_C519 | FAM65B Protein FAM65B | 9060 |
| Q8N8A6_C402 | DDX51 ATP-dependent RNA | 9061 |
| | helicase DDX51 | |
| Q92900_C188 | UPF1 Regulator of nonsense | 9062 |
| | transcripts 1 | |
| Q27J81_C971 | INF2 Inverted formin-2 | 9063 |
| O00422_C26 | SAP18 Histone deacetylase | 9064 |
| | complex subunit SAP18 | |
| Q9BRU9_C207 | UTP23 rRNA-processing | 9065 |
| | protein UTP23 homolog | |
| Q9NV88_C578 | INTS9 Integrator complex | 9066 |
| | subunit 9 | |
| P57740_C78 | NUP107 Nuclear pore | 9067 |
| | complex protein Nup107 | |
| Q15005_C26 | SPCS2 Signal peptidase | 9068 |
| | complex subunit 2 | |
| O75643_C238 | SNRNP200 U5 small nuclear | 9069 |
| | ribonucleoprotein 200 kDa | |
| | helicase | |
| Q92608_C41 | DOCK2 Dedicator of | 9070 |
| | cytokinesis protein 2 | |
| P62913_C72 | RPL11 60S ribosomal protein | 9071 |
| | L11 | |
| Q96FS4_C755 | SIPA1 Signal-induced | 9072 |
| | proliferation-associated | |
| | protein 1 | |
| Q92974_C306 | ARHGEF2 Rho guanine | 9073 |
| | nucleotide exchange factor 2 | |
| Q8TDB6_C175 | DTX3L E3 ubiquitin-protein | 9074 |
| | ligase DTX3L | |
| Q68EM7_C305 | ARHGAP17 Rho GTPase- | 9075 |
| | activating protein 17 | |
| O75131_C54 | CPNE3 Copine-3 | 9076 |
| Q9P107_C895 | GMIP GEM-interacting | 9077 |
| | protein | |
| Q8IYQ7_C324 | THNSL1 Threonine synthase- | 9078 |
| | like 1 | |
| Q05086_C83 | UBE3A Ubiquitin-protein | 9079 |
| | ligase E3A | |
| Q8IWZ3_C181 | ANKHD1 Ankyrin repeat and | 9080 |
| | KH domain-containing protein | |
| | 1 | |
| Q14671_C1179 | PUM1 Pumilio homolog 1 | 9081 |
| Q9BVL2_C252 | NUPL1 Nucleoporin p58/p45 | 9082 |
| Q8NF50_C186 | DOCK8 Dedicator of | 9083 |
| | cytokinesis protein 8 | |
| Q9HB21_C389 | PLEKHA1 Pleckstrin | 9084 |
| | homology domain-containing | |
| | family A member 1 | |
| Q96HC4_C213 | PDLIM5 PDZ and LIM | 9085 |
| | domain protein 5 | |
| Q9UPU5_C1362 | USP24 Ubiquitin carboxyl- | 9086 |
| | terminal hydrolase 24 | |
| Q9Y5T5_C618 | USP16 Ubiquitin carboxyl- | 9087 |
| | terminal hydrolase 16 | |
| Q9Y570_C381 | PPME1 Protein phosphatase | 9088 |
| | methylesterase 1 | |
| Q9NYK5_C133 | MRPL39 39S ribosomal | 9089 |
| | protein L39, mitochondrial | |
| Q96T51_C703 | RUFY1 RUN and FYVE | 9090 |
| | domain-containing protein 1 | |
| Q16643_C613 | DBN1 Drebrin | 9091 |
| Q9Y5B0_C429 | CTDP1 RNA polymerase II | 9092 |
| | subunit A C-terminal domain | |
| | phosphatase | |
| Q8N806_C260 | UBR7 Putative E3 ubiquitin- | 9093 |
| | protein ligase UBR7 | |
| Q96K76_C856 | USP47 Ubiquitin carboxyl- | 9094 |
| | terminal hydrolase 47 | |
| Q9UDY8_C71 | MALT1 Mucosa-associated | 9095 |
| | lymphoid tissue lymphoma | |
| | translocation protein 1 | |
| Q8IY81_C577 | FTSJ3 pre-rRNA processing | 9096 |
| | protein FTSJ3 | |
| P21333_C796 | FLNA Filamin-A | 9097 |
| P11413_C446 | G6PD Glucose-6-phosphate 1- | 9098 |
| | dehydrogenase | |
| P42575_C320 | CASP2 Caspase-2 | 9099 |
| Q04760_C61 | GLO1 Lactoylglutathione | 9100 |
| | lyase | |
| O00562_C259 | PITPNM1 Membrane- | 9101 |
| | associated | |
| | phosphatidylinositol transfer | |
| P49848_C141 | TAF6 Transcription initiation | 9102 |
| | factor TFIID subunit 6 | |
| P08567_C160 | PLEK Pleckstrin | 9103 |
| Q7Z7H8_C180 | MRPL10 39S ribosomal | 9104 |
| | protein L10, mitochondrial | |
| O95786_C268 | DDX58 Probable ATP- | 9105 |
| | dependent RNA helicase | |
| | DDX58 | |
| P17655_C105 | CAPN2 Calpain-2 catalytic | 9106 |
| | subunit | |
| O00541_C361 | PES1 Pescadillo homolog | 9107 |
| Q8WVV9_C405 | HNRPLL Heterogeneous | 9108 |
| | nuclear ribonucleoprotein L- | |
| | like | |
| P45974_C335 | USP5 Ubiquitin carboxyl- | 9109 |
| | terminal hydrolase 5 | |
| P14868_C203 | DARS Aspartate--tRNA | 9110 |
| | ligase, cytoplasmic | |
| Q8WWY3_C247 | PRPF31 U4/U6 small nuclear | 9111 |
| | ribonucleoprotein Prp31 | |
| Q9P258_C280 | RCC2 Protein RCC2 | 9112 |
| P22087_C99 | FBL rRNA 2-O- | 9113 |
| | methyltransferase fibrillarin | |
| Q8N8A2_C408 | ANKRD44 Serine/threonine- | 9114 |
| | protein phosphatase 6 | |
| | regulatory | |
| Q96EB1_C361 | ELP4 Elongator complex | 9115 |
| | protein 4 | |
| P20073_C413 | ANXA7 Annexin A7 | 9116 |
| Q6PGP7_C1162 | TTC37 Tetratricopeptide | 9117 |
| | repeat protein 37 | |
| Q9Y490_C1978 | TLN1 Talin-1 | 9118 |
| Q14204_C1888 | DYNC1H1 Cytoplasmic | 9119 |
| | dynein 1 heavy chain 1 | |
| Q8N8A2_C334 | ANKRD44 Serine/threonine- | 9120 |
| | protein phosphatase 6 | |
| | regulatory | |
| Q96EY4_C162 | TMA16 Translation | 9121 |
| | machinery-associated protein | |
| | 16 | |
| Q9UJX4_C203 | ANAPC5 Anaphase- | 9122 |
| | promoting complex subunit 5 | |
| Q9Y490_C1509 | TLN1 Talin-1 | 9123 |
| P07814_C1480 | EPRS Bifunctional | 9124 |
| | glutamate/proline--tRNA | |
| | ligase | |
| Q14152_C198 | EIF3A Eukaryotic translation | 9125 |
| | initiation factor 3 subunit | |
| P52306_C29 | RAP1GDS1 Rap1 GTPase- | 9126 |
| | GDP dissociation stimulator 1 | |
| Q96RL1_C257 | UIMC1 BRCA1-A complex | 9127 |
| | subunit RAP80 | |
| Q8N4N3_C254 | KLHL36 Kelch-like protein 36 | 9128 |
| Q92616_C55 | GCN1L1 Translational | 9129 |
| | activator GCN1 | |
| Q14966_C652 | ZNF638 Zinc finger protein | 9130 |
| | 638 | |
| P40763_C687 | STAT3 Signal transducer and | 9131 |
| | activator of transcription 3 | |
| P22307_C94 | SCP2 Non-specific lipid- | 9132 |
| | transfer protein | |
| P41250_C466 | GARS Glycine--tRNA ligase | 9133 |
| Q8WXH0_C5315 | SYNE2 Nesprin-2 | 9134 |
| P13639_C567 | EEF2 Elongation factor 2 | 9135 |
| Q99973_C171 | TEP1 Telomerase protein | 9136 |
| | component 1 | |
| Q8N4C6_C1986 | NIN Ninein | 9137 |
| Q8TBC4_C237 | UBA3 NEDD8-activating | 9138 |
| | enzyme E1 catalytic subunit | |
| Q5VWQ0_C318 | RSBN1 Round spermatid | 9139 |
| | basic protein 1 | |
| Q96FS4_C732 | SIPA1 Signal-induced | 9140 |
| | proliferation-associated | |
| | protein 1 | |
| P20700_C198 | LMNB1 Lamin-B1 | 9141 |
| P34949_C289 | MPI Mannose-6-phosphate | 9142 |
| | isomerase | |
| Q5T1M5_C828 | FKBP15 FK506-binding | 9143 |
| | protein 15 | |
| Q13315_C2991 | ATM Serine-protein kinase | 9144 |
| | ATM | |
| Q9UIG0_C953 | BAZ1B Tyrosine-protein | 9145 |
| | kinase BAZ1B | |
| Q9ULX6_C128 | AKAP8L A-kinase anchor | 9146 |
| | protein 8-like | |
| Q92620_C865 | DHX38 Pre-mRNA-splicing | 9147 |
| | factor ATP-dependent RNA | |
| | helicas | |
| Q7L5D6_C160 | GET4 Golgi to ER traffic | 9148 |
| | protein 4 homolog | |
| P34932_C417 | HSPA4 Heat shock 70 kDa | 9149 |
| | protein 4 | |
| Q7KZ85_C1435 | SUPT6H Transcription | 9150 |
| | elongation factor SPT6 | |
| Q9Y2Z2_C315 | MTO1 Protein MTO1 | 9151 |
| | homolog, mitochondrial | |
| P08514_C87 | ITGA2B Integrin alpha-IIb | 9152 |
| O75821_C139 | EIF3G Eukaryotic translation | 9153 |
| | initiation factor 3 subunit | |
| Q9Y265_C141 | RUVBL1 RuvB-like 1 | 9154 |
| Q969M7_C50 | UBE2F NEDD8-conjugating | 9155 |
| | enzyme UBE2F | |
| H3BSR4_C50 | UBE2F Ubiquitin-conjugating | 9156 |
| | enzyme E2F (Putative) | |
| P25098_C120 | ADRBK1 Beta-adrenergic | 9157 |
| | receptor kinase 1 | |
| O60831_C28 | PRAF2 PRA1 family protein 2 | 9158 |
| O00429_C367 | DNM1L Dynamin-1-like | 9159 |
| | protein | |
| Q7Z5K2_C160 | WAPAL Wings apart-like | 9160 |
| | protein homolog | |
| P13807_C699 | GYS1 Glycogen | 9161 |
| Q96CP2_C132 | FLYWCH2 FLYWCH family | 9162 |
| | member 2 | |
| P26651_C250 | ZFP36 Tristetraprolin | 9163 |
| Q92974_C478 | ARHGEF2 Rho guanine | 9164 |
| | nucleotide exchange factor 2 | |
| Q9H4B7_C303 | TUBB1 Tubulin beta-1 chain | 9165 |
| Q9Y5A7_C52 | NUB1 NEDD8 ultimate buster | 9166 |
| | 1 | |
| Q8IZD4_C369 | DCP1B mRNA-decapping | 9167 |
| | enzyme 1B | |
| Q13422_C223 | IKZF1 DNA-binding protein | 9168 |
| | Ikaros | |
| Q15181_C270 | PPA1 Inorganic | 9169 |
| | pyrophosphatase | |
| P49916_C929 | LIG3 DNA ligase 3 | 9170 |
| Q9Y6C9_C49 | MTCH2 Mitochondrial carrier | 9171 |
| | homolog 2 | |
| O15265_C639 | ATXN7 Ataxin-7 | 9172 |
| Q9BQ67_C11 | GRWD1 Glutamate-rich WD | 9173 |
| | repeat-containing protein 1 | |
| Q7Z6Z7_C3658 | HUWE1 E3 ubiquitin-protein | 9174 |
| | ligase HUWE1 | |
| Q9BTE3_C325 | MCMBP Mini-chromosome | 9175 |
| | maintenance complex-binding | |
| | protein | |
| Q92917_C137 | GPKOW G patch domain and | 9176 |
| | KOW motifs-containing | |
| | protein | |
| Q9BSA9_C32 | TMEM175 Transmembrane | 9177 |
| | protein 175 | |
| Q9H9A5_C504 | CNOT10 CCR4-NOT | 9178 |
| | transcription complex subunit | |
| | 10 | |
| P0CB43_C51 | FAM203B Protein FAM203B | 9179 |
| Q9BWU0_C125 | SLC4A1AP Kanadaptin | 9180 |
| Q96FW1_C91 | OTUB1 Ubiquitin thioesterase | 9181 |
| | OTUB1 | |
| Q9UEY8_C73 | ADD3 Gamma-adducin | 9182 |
| Q8N4N3_C308 | KLHL36 Kelch-like protein 36 | 9183 |
| Q9H3M7_C170 | TXNIP Thioredoxin- | 9184 |
| | interacting protein | |
| Q8N9N7_C128 | LRRC57 Leucine-rich repeat- | 9185 |
| | containing protein 57 | |
| I3L1I5_C144 | Uncharacterized protein | 9186 |
| Q7L2J0_C54 | MEPCE 7SK snRNA | 9187 |
| | methylphosphate capping | |
| | enzyme | |
| Q9Y2H0_C800 | DLGAP4 Disks large- | 9188 |
| | associated protein 4 | |
| Q9Y314_C8 | NOSIP Nitric oxide synthase- | 9189 |
| | interacting protein | |
| Q9Y490_C1927 | TLN1 Talin-1 | 9190 |
| Q8N2G8_C502 | GHDC GH3 domain- | 9191 |
| | containing protein | |
| P53992_C78 | SEC24C Protein transport | 9192 |
| | protein Sec24C | |
| P60891_C91 | PRPS1 Ribose-phosphate | 9193 |
| | pyrophosphokinase 1 | |
| P11908_C91 | PRPS2 Ribose-phosphate | 9194 |
| | pyrophosphokinase 2 | |
| P21108_C91 | PRPS1L1 Ribose-phosphate | 9195 |
| | pyrophosphokinase 3 | |
| Q9UPN7_C216 | PPP6R1 Serine/threonine- | 9196 |
| | protein phosphatase 6 | |
| | regulatory | |
| Q63HN8_C3084 | RNF213 E3 ubiquitin-protein | 9197 |
| | ligase RNF213 | |
| P61247_C111 | RPS3A 40S ribosomal protein | 9198 |
| | S3a | |
| P18583_C2070 | SON Protein SON | 9199 |
| P28331_C727 | NDUFS1 NADH-ubiquinone | 9200 |
| | oxidoreductase 75 kDa | |
| | subunit, mitochondrial | |
| P46063_C478 | RECQL ATP-dependent DNA | 9201 |
| | helicase Q1 | |
| Q7L2J0_C429 | MEPCE 7SK snRNA | 9202 |
| | methylphosphate capping | |
| | enzyme | |
| Q9NR45_C287 | NANS Sialic acid synthase | 9203 |
| Q92945_C379 | KHSRP Far upstream element- | 9204 |
| | binding protein 2 | |
| O75934_C132 | BCAS2 Pre-mRNA-splicing | 9205 |
| | factor SPF27 | |
| P42229_C101 | STAT5A Signal transducer | 9206 |
| | and activator of transcription 5 | |
| Q96SI9_C195 | STRBP Spermatid perinuclear | 9207 |
| | RNA-binding protein | |
| P78527_C1629 | PRKDC DNA-dependent | 9208 |
| | protein kinase catalytic subunit | |
| P28715_C12 | ERCC5 DNA repair protein | 9209 |
| | complementing XP-G cells | |
| O60318_C1839 | MCM3AP 80 kDa MCM3- | 9210 |
| | associated protein | |
| P43354_C190 | NR4A2 Nuclear receptor | 9211 |
| | subfamily 4 group A member | |
| | 2 | |
| Q562E7_C215 | WDR81 WD repeat-containing | 9212 |
| | protein 81 | |
| P61247_C139 | RPS3A 40S ribosomal protein | 9213 |
| | S3a | |
| P19174_C646 | PLCG1 1-phosphatidylinositol | 9214 |
| | 4,5-bisphosphate | |
| | phosphodiesterase | |
| Q8IUR7_C283 | ARMC8 Armadillo repeat- | 9215 |
| | containing protein 8 | |
| O75828_C227 | CBR3 Carbonyl reductase | 9216 |
| Q9NR30_C291 | DDX21 Nucleolar RNA | 9217 |
| | helicase 2 | |
| Q9HCK8_C1655 | CHD8 Chromodomain- | 9218 |
| | helicase-DNA-binding protein | |
| | 8 | |
| Q5T4S7_C3864 | UBR4 E3 ubiquitin-protein | 9219 |
| | ligase UBR4 | |
| Q9H869_C290 | YY1AP1 YY1-associated | 9220 |
| | protein 1 | |
| Q3T8J9_C813 | GON4L GON-4-like protein | 9221 |
| P11161_C234 | EGR2 E3 SUMO-protein | 9222 |
| | ligase EGR2 | |
| P50579_C436 | METAP2 Methionine | 9223 |
| | aminopeptidase 2 | |
| P42229_C126 | STAT5A Signal transducer | 9224 |
| | and activator of transcription 5 | |
| Q15545_C72 | TAF7 Transcription initiation | 9225 |
| | factor TFIID subunit 7 | |
| Q9UM19_C187 | HPCAL4 Hippocalcin-like | 9226 |
| | protein 4 | |
| Q92989_C338 | CLP1 Polyribonucleotide 5- | 9227 |
| | hydroxyl-kinase Clp1 | |
| Q5VV42_C138 | CDKAL1 | 9228 |
| | Threonylcarbamoyladenosine | |
| | tRNA methylthiotransferase | |
| Q9BVQ7_C580 | SPATA5L1 Spermatogenesis- | 9229 |
| | associated protein 5-like | |
| | protein | |
| P24928_C451 | POLR2A DNA-directed RNA | 9230 |
| | polymerase II subunit RPB1 | |
| Q14573_C2668 | ITPR3 Inositol 1,4,5- | 9231 |
| | trisphosphate receptor type 3 | |
| Q9NUU7_C392 | DDX19A ATP-dependent | 9232 |
| | RNA helicase DDX19A | |
| Q9UMR2_C393 | DDX19B ATP-dependent | 9233 |
| | RNA helicase DDX19B | |
| P49368_C398 | CCT3 T-complex protein 1 | 9234 |
| | subunit gamma | |
| P0DJD1_C348 | RGPD2 RANBP2-like and | 9235 |
| | GRIP domain-containing | |
| | protein 2 | |
| Q8TF42_C367 | UBASH3B Ubiquitin- | 9236 |
| | associated and SH3 domain- | |
| | containing protein | |
| Q9BWG4_C81 | SSBP4 Single-stranded DNA- | 9237 |
| | binding protein 4 | |
| P50995_C501 | ANXA11 Annexin A11 | 9238 |
| Q9UPP1_C684 | PHF8 Histone lysine | 9239 |
| | demethylase PHF8 | |
| Q9UQ35_C1036 | SRRM2 Serine/arginine | 9240 |
| | repetitive matrix protein 2 | |
| Q9Y6A5_C749 | TACC3 Transforming acidic | 9241 |
| | coiled-coil-containing protein | |
| P13489_C248 | RNH1 Ribonuclease inhibitor | 9242 |
| Q66K74_C588 | MAP1S Microtubule- | 9243 |
| | associated protein 1S | |
| Q16881_C209 | TXNRD1 Thioredoxin | 9244 |
| | reductase 1, cytoplasmic | |
| H0YBQ0_C258 | TXNRD3 Thioredoxin | 9245 |
| | reductase 3 | |
| Q9NNW7_C86 | TXNRD2 Thioredoxin | 9246 |
| | reductase 2, mitochondrial | |
| P78527_C1499 | PRKDC DNA-dependent | 9247 |
| | protein kinase catalytic subunit | |
| Q9UGR2_C956 | ZC3H7B Zinc finger CCCH | 9248 |
| | domain-containing protein 7B | |
| P49903_C71 | SEPHS1 Selenide, water | 9249 |
| | dikinase 1 | |
| O14976_C87 | GAK Cyclin-G-associated | 9250 |
| | kinase | |
| Q86WB0_C406 | ZC3HC1 Nuclear-interacting | 9251 |
| | partner of ALK | |
| Q9H9A6_C23 | LRRC40 Leucine-rich repeat- | 9252 |
| | containing protein 40 | |
| Q3KQU3_C373 | MAP7D1 MAP7 domain- | 9253 |
| | containing protein 1 | |
| Q9H4L5_C24 | OSBPL3 Oxysterol-binding | 9254 |
| | protein-related protein 3 | |
| P27987_C561 | ITPKB Inositol-trisphosphate | 9255 |
| | 3-kinase B | |
| Q9Y520_C177 | PRRC2C Protein PRRC2C | 9256 |
| P53041_C77 | PPP5C Serine/threonine- | 9257 |
| | protein phosphatase 5 | |
| Q9Y2H0_C726 | DLGAP4 Disks large- | 9258 |
| | associated protein 4 | |
| P21580_C54 | TNFAIP3 Tumor necrosis | 9259 |
| | factor alpha-induced protein 3 | |
| Q15334_C505 | LLGL1 Lethal(2) giant larvae | 9260 |
| | protein homolog 1 | |
| O15111_C406 | CHUK Inhibitor of nuclear | 9261 |
| | factor kappa-B kinase subunit | |
| Q14149_C797 | MORC3 MORC family CW- | 9262 |
| | type zinc finger protein 3 | |
| O00329_C219 | PIK3CD Phosphatidylinositol | 9263 |
| | 4,5-bisphosphate 3-kinase | |
| | catalytic subunit delta isoform | |
| Q9NPD3_C97 | EXOSC4 Exosome complex | 9264 |
| | component RRP41 | |
| P98171_C527 | ARHGAP4 Rho GTPase- | 9265 |
| | activating protein 4 | |
| Q8NFI3_C454 | ENGASE Cytosolic endo- | 9266 |
| | beta-N-acetylglucosaminidase | |
| Q13342_C686 | SP140 Nuclear body protein | 9267 |
| | SP140 | |
| Q9H930_C399 | SP140L Nuclear body protein | 9268 |
| | SP140-like protein | |
| Q9C0B0_C696 | UNK RING finger protein | 9269 |
| | unkempt homolog | |
| Q8TB03_C12 | CXorf38 Uncharacterized | 9270 |
| | protein CXorf38 | |
| P21580_C767 | TNFAIP3 Tumor necrosis | 9271 |
| | factor alpha-induced protein 3 | |
| O94906_C698 | PRPF6 Pre-mRNA-processing | 9272 |
| | factor 6 | |
| P43304_C385 | GPD2 Glycerol-3-phosphate | 9273 |
| | dehydrogenase, mitochondrial | |
| Q9H4E7_C267 | DEF6 Differentially expressed | 9274 |
| | in FDCP 6 homolog | |
| Q8NEM7_C298 | FAM48A Protein FAM48A | 9275 |
| O75367_C286 | H2AFY Core histone macro- | 9276 |
| | H2A.1 | |
| O00148_C197 | DDX39A ATP-dependent | 9277 |
| | RNA helicase DDX39A | |
| P40926_C275 | MDH2 Malate dehydrogenase, | 9278 |
| | mitochondrial | |
| Q6P2E9_C249 | EDC4 Enhancer of mRNA- | 9279 |
| | decapping protein 4 | |
| Q9Y6K9_C54 | IKBKG NF-kappa-B essential | 9280 |
| | modulator | |
| Q8TDB6_C159 | DTX3L E3 ubiquitin-protein | 9281 |
| | ligase DTX3L | |
| Q5SSJ5_C359 | HP1BP3 Heterochromatin | 9282 |
| | protein 1-binding protein 3 | |
| P41252_C87 | IARS Isoleucine--tRNA | 9283 |
| | ligase, cytoplasmic | |
| P28838_C445 | LAP3 Cytosol aminopeptidase | 9284 |
| P62979_C144 | RPS27A Ubiquitin-40S | 9285 |
| | ribosomal protein S27a | |
| Q29RF7_C1084 | PDS5A Sister chromatid | 9286 |
| | cohesion protein PDS5 | |
| | homolog A | |
| Q9UPN7_C437 | PPP6R1 Serine/threonine- | 9287 |
| | protein phosphatase 6 | |
| | regulatory | |
| Q04206_C38 | RELA Transcription factor | 9288 |
| | p65 | |
| Q9BTT0_C87 | ANP32E Acidic leucine-rich | 9289 |
| | nuclear phosphoprotein 32 | |
| | family | |
| Q6ZMZ3_C251 | SYNE3 Nesprin-3 | 9290 |
| Q8N201_C969 | INTS1 Integrator complex | 9291 |
| | subunit 1 | |
| Q7Z591_C1078 | AKNA AT-hook-containing | 9292 |
| | transcription factor | |
| Q9ULT8_C1995 | HECTD1 E3 ubiquitin-protein | 9293 |
| | ligase HECTD1 | |
| Q8IZL8_C239 | PELP1 Proline-, glutamic | 9294 |
| | acid- and leucine-rich protein | |
| Q7Z6I6_C1021 | ARHGAP30 Rho GTPase- | 9295 |
| | activating protein 30 | |
| Q8NDX1_C988 | PSD4 PH and SEC7 domain- | 9296 |
| | containing protein 4 | |
| Q92598_C658 | HSPH1 Heat shock protein | 9297 |
| | 105 kDa | |
| Q15020_C537 | SART3 Squamous cell | 9298 |
| | carcinoma antigen recognized | |
| | by T-cells 3 | |
| Q9UJC3_C432 | HOOK1 Protein Hook | 9299 |
| | homolog 1 | |
| Q9BQG0_C1031 | MYBBP1A Myb-binding | 9300 |
| | protein 1A | |
| O00170_C208 | AIP AH receptor-interacting | 9301 |
| | protein | |
| O60244_C729 | MED14 Mediator of RNA | 9302 |
| | polymerase II transcription | |
| | subunit | |
| Q9NUB1_C422 | ACSS1 Acetyl-coenzyme A | 9303 |
| | synthetase 2-like, | |
| | mitochondrial | |
| O76074_C447 | PDE5A cGMP-specific 3,5- | 9304 |
| | cyclic phosphodiesterase | |
| Q96EY5_C231 | FAM125A Multivesicular | 9305 |
| | body subunit 12A | |
| Q9P2I0_C621 | CPSF2 Cleavage and | 9306 |
| | polyadenylation specificity | |
| | factor subunit | |
| Q9NQC7_C129 | CYLD Ubiquitin carboxyl- | 9307 |
| | terminal hydrolase CYLD | |
| P49903_C31 | SEPHS1 Selenide, water | 9308 |
| | dikinase 1 | |
| P22102_C41 | GART Trifunctional purine | 9309 |
| | biosynthetic protein adenosin | |
| Q13464_C1206 | ROCK1 Rho-associated | 9310 |
| | protein kinase 1 | |
| Q01813_C112 | PFKP 6-phosphofructokinase | 9311 |
| | type C | |
| P16188_C188 | HLA-A HLA class I histocompatibility | 9312 |
| | antigen, A-30 alpha | |
| P18463_C188 | HLA-B HLA class I histocompatibility | 9313 |
| | antigen, B-37 alpha | |
| P30499_C188 | HLA-C HLA class I histocompatibility | 9314 |
| | antigen, Cw-1 alpha | |
| P30492_C188 | HLA-B HLA class I histocompatibility | 9315 |
| | antigen, B-54 alpha | |
| Q29940_C188 | HLA-B HLA class I histocompatibility | 9316 |
| | antigen, B-59 alpha | |
| F8VZB9_C225 | HLA-C HLA class I histocompatibility | 9317 |
| | antigen, Cw-14 alpha | |
| P10321_C188 | HLA-C HLA class I histocompatibility | 9318 |
| | antigen, Cw-7 alpha | |
| Q96Q15_C3401 | SMG1 Serine/threonine- | 9319 |
| | protein kinase SMG1 | |
| P27635_C71 | RPL10 60S ribosomal protein | 9320 |
| | L10 | |
| P49756_C83 | RBM25 RNA-binding protein | 9321 |
| | 25 | |
| Q8NE71_C758 | ABCF1 ATP-binding cassette | 9322 |
| | sub-family F member 1 | |
| O95696_C441 | BRD1 Bromodomain- | 9323 |
| | containing protein 1 | |
| Q9NXR7_C34 | BRE BRCA1-A complex | 9324 |
| | subunit BRE | |
| O00478_C512 | BTN3A3 Butyrophilin | 9325 |
| | subfamily 3 member A3 | |
| O60942_C419 | RNGTT mRNA-capping | 9326 |
| | enzyme | |
| Q16831_C17 | UPP1 Uridine phosphorylase 1 | 9327 |
| Q14142_C20 | TRIM14 Tripartite motif- | 9328 |
| | containing protein 14 | |
| O75367_C276 | H2AFY Core histone macro- | 9329 |
| | H2A.1 | |
| Q15052_C57 | ARHGEF6 Rho guanine | 9330 |
| | nucleotide exchange factor 6 | |
| P35626_C340 | ADRBK2 Beta-adrenergic | 9331 |
| | receptor kinase 2 | |
| P25098_C340 | ADRBK1 Beta-adrenergic | 9332 |
| | receptor kinase 1 | |
| P15428_C182 | HPGD 15- | 9333 |
| | hydroxyprostaglandin | |
| | dehydrogenase | |
| Q96FZ2_C131 | C3orf37 UPF0361 protein | 9334 |
| | C3orf37 | |
| Q9Y2H0_C736 | DLGAP4 Disks large- | 9335 |
| | associated protein 4 | |
| Q8TCU4_C2878 | ALMS1 Alstrom syndrome | 9336 |
| | protein 1 | |
| O95801_C238 | TTC4 Tetratricopeptide repeat | 9337 |
| | protein 4 | |
| O95571_C219 | ETHE1 Protein ETHE1, | 9338 |
| | mitochondrial | |
| Q9H4Z3_C29 | PCIF1 Phosphorylated CTD- | 9339 |
| | interacting factor 1 | |
| P55957_C15 | BID BH3-interacting domain | 9340 |
| | death agonist | |
| P49458_C39 | SRP9 Signal recognition | 9341 |
| | particle 9 kDa protein | |
| Q9NQ88_C161 | TIGAR Fructose-2,6- | 9342 |
| | bisphosphatase TIGAR | |
| P22234_C63 | PAICS Multifunctional protein | 9343 |
| | ADE2 | |
| P35611_C253 | ADD1 Alpha-adducin | 9344 |
| P19474_C463 | TRIM21 E3 ubiquitin-protein | 9345 |
| | ligase TRIM21 | |
| Q12874_C103 | SF3A3 Splicing factor 3A | 9346 |
| | subunit 3 | |
| Q03188_C612 | CENPC1 Centromere protein | 9347 |
| | C 1 | |
| P42166_C518 | TMPO Lamina-associated | 9348 |
| | polypeptide 2, isoform alpha | |
| Q9NY12_C80 | GAR1 H/ACA | 9349 |
| | ribonucleoprotein complex | |
| | subunit 1 | |
| Q10567_C241 | AP1B1 AP-1 complex subunit | 9350 |
| | beta-1 | |
| Q96F86_C499 | EDC3 Enhancer of mRNA- | 9351 |
| | decapping protein 3 | |
| Q86UV5_C986 | USP48 Ubiquitin carboxyl- | 9352 |
| | terminal hydrolase 48 | |
| P49368_C213 | CCT3 T-complex protein 1 | 9353 |
| | subunit gamma | |
| P08559_C91 | PDHA1 Pyruvate | 9354 |
| | dehydrogenase E1 component | |
| | subunit alpha, mitochondrial | |
| Q96SZ5_C18 | ADO 2-aminoethanethiol | 9355 |
| | dioxygenase | |
| Q92974_C715 | ARHGEF2 Rho guanine | 9356 |
| | nucleotide exchange factor 2 | |
| Q92597_C289 | NDRG1 Protein NDRG1 | 9357 |
| Q9BZF2_C466 | OSBPL7 Oxysterol-binding | 9358 |
| | protein-related protein 7 | |
| Q9BQ69_C186 | MACROD1 O-acetyl-ADP- | 9359 |
| | ribose deacetylase MACROD1 | |
| Q14738_C17 | PPP2R5D Serine/threonine- | 9360 |
| | protein phosphatase 2A 56 | |
| | kDa regulatory subunit, delta | |
| | isoform | |
| P55210_C186 | CASP7 Caspase-7 | 9361 |
| P31939_C241 | ATIC Bifunctional purine | 9362 |
| | biosynthesis protein PURH | |
| O00329_C366 | PIK3CD Phosphatidylinositol | 9363 |
| | 4,5-bisphosphate 3-kinase | |
| | catalytic subunit delta isoform | |
| Q9NZT2_C417 | OGFR Opioid growth factor | 9364 |
| | receptor | |
| Q96I25_C302 | RBM17 Splicing factor 45 | 9365 |
| | CPTK | |
| Q13158_C98 | FADD Protein FADD | 9366 |
| P52948_C1312 | NUP98 Nuclear pore complex | 9367 |
| | protein Nup98-Nup96 | |
| Q7Z5K2_C964 | WAPAL Wings apart-like | 9368 |
| | protein homolog | |
| Q8NI37_C57 | PPTC7 Protein phosphatase | 9369 |
| | PTC7 homolog | |
| Q9Y6Y8_C604 | SEC23IP SEC23-interacting | 9370 |
| | protein | |
| Q969E8_C114 | TSR2 Pre-rRNA-processing | 9371 |
| | protein TSR2 homolog | |
| Q9UEW8_C82 | STK39 STE20/SPS1-related | 9372 |
| | proline-alanine-rich protein | |
| | kinase | |
| Q9P032_C87 | NDUFAF4 NADH | 9373 |
| | dehydrogenase | |
| Q7L2J0_C244 | MEPCE 7SK snRNA | 9374 |
| | methylphosphate capping | |
| | enzyme | |
| Q70CQ2_C741 | USP34 Ubiquitin carboxyl- | 9375 |
| | terminal hydrolase 34 | |
| Q08378_C1403 | GOLGA3 Golgin subfamily A | 9376 |
| | member 3 | |
| Q14C86_C741 | GAPVD1 GTPase-activating | 9377 |
| | protein and VPS9 domain- | |
| | containing protein 1 | |
| O00267_C626 | SUPT5H Transcription | 9378 |
| | elongation factor SPT5 | |
| P51159_C188 | RAB27A Ras-related protein | 9379 |
| | Rab-27A | |
| Q9NZ63_C145 | C9orf78 Uncharacterized | 9380 |
| | protein C9orf78 | |
| P15374_C95 | UCHL3 Ubiquitin carboxyl- | 9381 |
| | terminal hydrolase isozyme L3 | |
| Q9H9A5_C633 | CNOT10 CCR4-NOT | 9382 |
| | transcription complex subunit | |
| | 10 | |
| Q99614_C28 | TTC1 Tetratricopeptide repeat | 9383 |
| | protein 1 | |
| Q8ND71_C75 | GIMAP8 GTPase IMAP | 9384 |
| | family member 8 | |
| P11171_C224 | EPB41 Protein 4.1 | 9385 |
| Q9H400_C138 | LIME1 Lck-interacting | 9386 |
| | transmembrane adapter 1 | |
| Q9BVC5_C10 | C2orf49 Ashwin | 9387 |
| Q15007_C270 | WTAP Pre-mRNA-splicing | 9388 |
| | regulator WTAP | |
| P17987_C76 | TCP1 T-complex protein 1 | 9389 |
| | subunit alpha | |
| H7BZ11_C99 | Uncharacterized protein | 9390 |
| Q969Q0_C88 | RPL36AL 60S ribosomal | 9391 |
| | protein L36a-like | |
| Q9NS86_C187 | LANCL2 LanC-like protein 2 | 9392 |
| Q9H7N4_C675 | SCAF1 Splicing factor, | 9393 |
| | arginine/serine-rich 19 | |
| Q9Y3S1_C326 | WNK2 Serine/threonine- | 9394 |
| | protein kinase WNK2 | |
| Q9BYP7_C278 | WNK3 Serine/threonine- | 9395 |
| | protein kinase WNK3 | |
| Q9H4A3_C352 | WNK1 Serine/threonine- | 9396 |
| | protein kinase WNK1 | |
| Q8IYL3_C124 | C1orf174 UPF0688 protein | 9397 |
| | C1orf174 | |
| Q86YS7_C449 | KIAA0528 Uncharacterized | 9398 |
| | protein KIAA0528 | |
| Q86UW7_C1052 | CADPS2 Calcium-dependent | 9399 |
| | secretion activator 2 | |
| Q9UBS0_C348 | RPS6KB2 Ribosomal protein | 9400 |
| | S6 kinase beta-2 | |
| O60232_C152 | SSSCA1 Sjoegren | 9401 |
| | syndrome/scleroderma | |
| | autoantigen 1 | |
| Q9NZT2_C87 | OGFR Opioid growth factor | 9402 |
| | receptor | |
| Q8N3D4_C1364 | EHBP1L1 EH domain-binding | 9403 |
| | protein 1-like protein 1 | |
| Q14980_C1729 | NUMA1 Nuclear mitotic | 9404 |
| | apparatus protein 1 | |
| Q15365_C118 | PCBP1 Poly(rC)-binding | 9405 |
| | protein 1 | |
| Q9UP83_C64 | COG5 Conserved oligomeric | 9406 |
| | Golgi complex subunit 5 | |
| Q5RKV6_C117 | EXOSC6 Exosome complex | 9407 |
| | component MTR3 | |
| Q96T23_C1436 | RSF1 Remodeling and spacing | 9408 |
| | factor 1 | |
| P13727_C147 | PRG2 Bone marrow | 9409 |
| | proteoglycan | |
| Q6NYC8_C276 | PPP1R18 Phostensin | 9410 |
| O60282_C393 | KIF5C Kinesin heavy chain | 9411 |
| | isoform 5C | |
| Q92616_C2015 | GCN1L1 Translational | 9412 |
| | activator GCN1 | |
| O75808_C101 | SOLH Calpain-15 | 9413 |
| Q9UQ35_C1029 | SRRM2 Serine/arginine | 9414 |
| | repetitive matrix protein 2 | |
| Q8IZ73_C246 | RPUSD2 RNA | 9415 |
| | pseudouridylate synthase | |
| | domain-containing protein | |
| Q92985_C394 | IRF7 Interferon regulatory | 9416 |
| | factor 7 | |
| P10914_C274 | IRF1 Interferon regulatory | 9417 |
| | factor 1 | |
| P50395_C202 | GDI2 Rab GDP dissociation | 9418 |
| | inhibitor beta | |
| Q9UK61_C690 | FAM208A Protein FAM208A | 9419 |
| Q9UPN7_C612 | PPP6R1 Serine/threonine- | 9420 |
| | protein phosphatase 6 | |
| | regulatory | |
| P07996_C813 | THBS1 Thrombospondin-1 | 9421 |
| Q96GW9_C428 | MARS2 Methionine--tRNA | 9422 |
| | ligase, mitochondrial | |
| O14920_C716 | IKBKB Inhibitor of nuclear | 9423 |
| | factor kappa-B kinase subunit | |
| Q7Z6I6_C20 | ARHGAP30 Rho GTPase- | 9424 |
| | activating protein 30 | |
| Q9NYV4_C1009 | CDK12 Cyclin-dependent | 9425 |
| | kinase 12 | |
| Q9UG63_C388 | ABCF2 ATP-binding cassette | 9426 |
| | sub-family F member 2 | |
| Q96AE4_C332 | FUBP1 Far upstream element- | 9427 |
| | binding protein 1 | |
| Q8N3P4_C1371 | VPS8 Vacuolar protein | 9428 |
| | sorting-associated protein 8 | |
| | homolog | |
| O15541_C15 | RNF113A RING finger | 9429 |
| | protein 113A | |
| Q9UBN7_C426 | HDAC6 Histone deacetylase 6 | 9430 |
| P41252_C526 | IARS Isoleucine--tRNA | 9431 |
| | ligase, cytoplasmic | |
| O60306_C28 | AQR Intron-binding protein | 9432 |
| | aquarius | |
| Q8NFW8_C432 | CMAS N-acylneuraminate | 9433 |
| | cytidylyltransferase | |
| Q9UHB4_C486 | NDOR1 NADPH-dependent | 9434 |
| | diflavin oxidoreductase 1 | |
| Q5TGY3_C1540 | AHDC1 AT-hook DNA- | 9435 |
| | binding motif-containing | |
| | protein 1 | |
| Q8IW35_C484 | CEP97 Centrosomal protein of | 9436 |
| | 97 kDa | |
| Q8WUA4_C212 | GTF3C2 General transcription | 9437 |
| | factor 3C polypeptide 2 | |
| Q6UUV7_C541 | CRTC3 CREB-regulated | 9438 |
| | transcription coactivator 3 | |
| Q5T4S7_C2449 | UBR4 E3 ubiquitin-protein | 9439 |
| | ligase UBR4 | |
| Q13155_C291 | AIMP2 Aminoacyl tRNA | 9440 |
| | synthase complex-interacting | |
| | multif | |
| Q8TEU7_C1561 | RAPGEF6 Rap guanine | 9441 |
| | nucleotide exchange factor 6 | |
| P49792_C1196 | RANBP2 E3 SUMO-protein | 9442 |
| | ligase RanBP2 | |
| O14617_C574 | AP3D1 AP-3 complex subunit | 9443 |
| | delta-1 | |
| Q6P2E9_C54 | EDC4 Enhancer of mRNA- | 9444 |
| | decapping protein 4 | |
| Q5VZ89_C975 | DENND4C DENN domain- | 9445 |
| | containing protein 4C | |
| P57772_C406 | EEFSEC Selenocysteine- | 9446 |
| | specific elongation factor | |
| P30041_C91 | PRDX6 Peroxiredoxin-6 | 9447 |
| Q9H2G2_C1212 | SLK STE20-like | 9448 |
| | serine/threonine-protein kinase | |
| Q16891_C603 | IMMT Mitochondrial inner | 9449 |
| | membrane protein | |
| P55201_C570 | BRPF1 Peregrin | 9450 |
| P09543_C49 | CNP 2,3-cyclic-nucleotide 3- | 9451 |
| | phosphodiesterase | |
| P53701_C178 | HCCS Cytochrome c-type | 9452 |
| | heme lyase | |
| O75376_C2056 | NCOR1 Nuclear receptor | 9453 |
| | corepressor 1 | |
| O60610_C164 | DIAPH1 Protein diaphanous | 9454 |
| | homolog 1 | |
| Q9ULL5_C112 | PRR12 Proline-rich protein 12 | 9455 |
| Q9UMS4_C230 | PRPF19 Pre-mRNA- | 9456 |
| | processing factor 19 | |
| Q99576_C112 | TSC22D3 TSC22 domain | 9457 |
| | family protein 3 | |
| Q9UFW8_C167 | CGGBP1 CGG triplet repeat- | 9458 |
| | binding protein 1 | |
| P62873_C25 | GNB1 Guanine nucleotide- | 9459 |
| | binding protein | |
| | G(I)/G(S)/G(T) | |
| P04049_C27 | RAF1 RAF proto-oncogene | 9460 |
| | serine/threonine-protein kinase | |
| Q9Y6A5_C426 | TACC3 Transforming acidic | 9461 |
| | coiled-coil-containing protein | |
| Q9Y6A5_C502 | TACC3 Transforming acidic | 9462 |
| | coiled-coil-containing protein | |
| Q9H6K4_C164 | OPA3 Optic atrophy 3 protein | 9463 |
| P25205_C360 | MCM3 DNA replication | 9464 |
| | licensing factor MCM3 | |
| Q9UMS0_C213 | NFU1 NFU1 iron-sulfur | 9465 |
| | cluster scaffold homolog, | |
| | mitochondrial | |
| Q08881_C143 | ITK Tyrosine-protein kinase | 9466 |
| | ITK/TSK | |
| Q14974_C455 | KPNB1 Importin subunit beta- | 9467 |
| | 1 | |
| Q8WVJ2_C14 | NUDCD2 NudC domain- | 9468 |
| | containing protein 2 | |
| O00139_C525 | KIF2A Kinesin-like protein | 9469 |
| | KIF2A | |
| Q96T51_C184 | RUFY1 RUN and FYVE | 9470 |
| | domain-containing protein 1 | |
| P08575_C1178 | PTPRC Receptor-type | 9471 |
| | tyrosine-protein phosphatase C | |
| P30626_C75 | SRI Sorcin | 9472 |
| P63010_C95 | AP2B1 AP-2 complex subunit | 9473 |
| | beta | |
| F5H5P2_C231 | Uncharacterized protein | 9474 |
| P12694_C197 | BCKDHA 2-oxoisovalerate | 9475 |
| | dehydrogenase subunit alpha, | |
| | mitochondrial | |
| Q14C86_C1129 | GAPVD1 GTPase-activating | 9476 |
| | protein and VPS9 domain- | |
| | containing protein 1 | |
| A6NKT7_C349 | RGPD3 RanBP2-like and | 9477 |
| | GRIP domain-containing | |
| | protein 3 | |
| Q9Y3L3_C56 | SH3BP1 SH3 domain-binding | 9478 |
| | protein 1 | |
| Q8IXH7_C293 | TH1L Negative elongation | 9479 |
| | factor C/D | |
| Q53ET0_C675 | CRTC2 CREB-regulated | 9480 |
| | transcription coactivator 2 | |
| Q9BZH6_C363 | WDR11 WD repeat-containing | 9481 |
| | protein 11 | |
| Q9BZH6_C364 | WDR11 WD repeat-containing | 9482 |
| | protein 11 | |
| O95466_C733 | FMNL1 Formin-like protein 1 | 9483 |
| P30876_C1155 | POLR2B DNA-directed RNA | 9484 |
| | polymerase II subunit RPB2 | |
| P57764_C457 | GSDMD Gasdermin-D | 9485 |
| P40925_C251 | MDH1 Malate dehydrogenase, | 9486 |
| | cytoplasmic | |
| Q29RF7_C1116 | PDS5A Sister chromatid | 9487 |
| | cohesion protein PDS5 | |
| | homolog A | |
| P15498_C845 | VAV1 Proto-oncogene vav | 9488 |
| Q8N163_C443 | KIAA1967 DBIRD complex | 9489 |
| | subunit KIAA1967 | |
| Q32P44_C307 | EML3 Echinoderm | 9490 |
| | microtubule-associated | |
| | protein-like 3 | |
| Q8WZ74_C759 | CTTNBP2 Cortactin-binding | 9491 |
| | protein 2 | |
| O60264_C165 | SMARCA5 SWI/SNF-related | 9492 |
| | matrix-associated actin- | |
| | dependent | |
| Q9BY77_C338 | POLDIP3 Polymerase delta- | 9493 |
| | interacting protein 3 | |
| P81877_C82 | SSBP2 Single-stranded DNA- | 9494 |
| | binding protein 2 | |
| O43396_C34 | TXNL1 Thioredoxin-like | 9495 |
| | protein 1 | |
| Q7Z6Z7_C1879 | HUWE1 E3 ubiquitin-protein | 9496 |
| | ligase HUWE1 | |
| Q5VT06_C2716 | CEP350 Centrosome- | 9497 |
| | associated protein 350 | |
| O95466_C939 | FMNL1 Formin-like protein 1 | 9498 |
| Q13045_C576 | FLII Protein flightless-1 | 9499 |
| | homolog | |
| Q8WUW1_C43 | BRK1 Protein BRICK1 | 9500 |
| Q86UP2_C303 | KTN1 Kinectin | 9501 |
| Q9BSQ5_C437 | CCM2 Malcavernin | 9502 |
| O43149_C212 | ZZEF1 Zinc finger ZZ-type | 9503 |
| | and EF-hand domain- | |
| | containing | |
| P19338_C543 | NCL Nucleolin | 9504 |
| P10599_C35 | TXN Thioredoxin | 9505 |
| Q9UNI6_C265 | DUSP12 Dual specificity | 9506 |
| | protein phosphatase 12 | |
| O43143_C774 | DHX15 Putative pre-mRNA- | 9507 |
| | splicing factor ATP-dependent | |
| | RN | |
| P25205_C148 | MCM3 DNA replication | 9508 |
| | licensing factor MCM3 | |
| P48553_C1130 | TRAPPC10 Trafficking | 9509 |
| | protein particle complex | |
| | subunit 10 | |
| Q86XR8_C497 | CEP57 Centrosomal protein of | 9510 |
| | 57 kDa | |
| P27987_C178 | ITPKB Inositol-trisphosphate | 9511 |
| | 3-kinase B | |
| Q86W50_C432 | METTL16 Methyltransferase- | 9512 |
| | like protein 16 | |
| O15042_C320 | U2SURP U2 snRNP- | 9513 |
| | associated SURP motif- | |
| | containing protein | |
| Q8IY17_C409 | PNPLA6 Neuropathy target | 9514 |
| | esterase | |
| Q8TDD1_C586 | DDX54 ATP-dependent RNA | 9515 |
| | helicase DDX54 | |
| Q13905_C474 | RAPGEF1 Rap guanine | 9516 |
| | nucleotide exchange factor 1 | |
| A4D1P6_C246 | WDR91 WD repeat-containing | 9517 |
| | protein 91 | |
| P78371_C535 | CCT2 T-complex protein 1 | 9518 |
| | subunit beta | |
| Q08J23_C502 | NSUN2 tRNA (cytosine(34)- | 9519 |
| | C(5))-methyltransferase | |
| Q8IV53_C781 | DENND1C DENN domain- | 9520 |
| | containing protein 1C | |
| O94776_C261 | MTA2 Metastasis-associated | 9521 |
| | protein MTA2 | |
| E7ENX8_C353 | Uncharacterized protein | 9522 |
| Q09666_C2806 | AHNAK Neuroblast | 9523 |
| | differentiation-associated | |
| | protein AHNA | |
| Q63HN8_C2536 | RNF213 E3 ubiquitin-protein | 9524 |
| | ligase RNF213 | |
| Q96EP0_C59 | RNF31 E3 ubiquitin-protein | 9525 |
| | ligase RNF31 | |
| Q86VP6_C1007 | CAND1 Cullin-associated | 9526 |
| | NEDD8-dissociated protein 1 | |
| Q9H0J9_C474 | PARP12 Polymerase | 9527 |
| Q14966_C259 | ZNF638 Zinc finger protein | 9528 |
| | 638 | |
| Q8WWW0_C225 | RASSF5 Ras association | 9529 |
| | domain-containing protein 5 | |
| Q96K58_C126 | ZNF668 Zinc finger protein | 9530 |
| | 668 | |
| Q12768_C385 | KIAA0196 WASH complex | 9531 |
| | subunit strumpellin | |
| Q96CW5_C168 | TUBGCP3 Gamma-tubulin | 9532 |
| | complex component 3 | |
| Q9BYW2_C1471 | SETD2 Histone-lysine N- | 9533 |
| | methyltransferase SETD2 | |
| Q7Z2W4_C518 | ZC3HAV1 Zinc finger CCCH- | 9534 |
| | type antiviral protein 1 | |
| Q6XQN6_C533 | NAPRT1 Nicotinate | 9535 |
| | phosphoribosyltransferase | |
| Q9Y6K9_C347 | IKBKG NF-kappa-B essential | 9536 |
| | modulator K.ASC*QESAR.I | |
| P11142_C603 | HSPA8 Heat shock cognate 71 | 9537 |
| | kDa protein K.VC*NPIITK.L | |
| I3L2F9_C269 | Uncharacterized protein | 9538 |
| | K.NMMAAC*DPR.H | |
| I3L2F9_C320 | Uncharacterized protein | 9539 |
| | K.TAVC*DIPPR.G | |
| Q96JB2_C349 | COG3 Conserved oligomeric | 9540 |
| | Golgi complex subunit 3 | |
| A2A288_C517 | ZC3H12D Probable | 9541 |
| | ribonuclease ZC3H12D | |
| Q9NR33_C85 | POLE4 DNA polymerase | 9542 |
| | epsilon subunit 4 | |
| Q8IXQ6_C728 | PARP9 Polymerase | 9543 |
| Q13422_C254 | IKZF1 DNA-binding protein | 9544 |
| | Ikaros | |
| Q14151_C361 | SAFB2 Scaffold attachment | 9545 |
| | factor B2 | |
| Q8TDX7_C298 | NEK7 Serine/threonine- | 9546 |
| | protein kinase Nek7 | |
| P61962_C256 | DCAF7 DDB1- and CUL4- | 9547 |
| | associated factor 7 | |
| Q00653_C738 | NFKB2 Nuclear factor NF- | 9548 |
| | kappa-B p100 subunit | |
| O95671_C274 | ASMTL N-acetylserotonin O- | 9549 |
| | methyltransferase-like protein | |
| Q92619_C599 | HMHA1 Minor | 9550 |
| | histocompatibility protein HA- | |
| | 1 | |
| Q9UJV9_C568 | DDX41 Probable ATP- | 9551 |
| | dependent RNA helicase | |
| | DDX41 | |
| C9J4G0_C66 | C17orf49 HCG32827, isoform | 9552 |
| | CRA_d | |
| I3L1I5_C221 | Uncharacterized protein | 9553 |
| Q9Y6I9_C165 | TEX264 Testis-expressed | 9554 |
| | sequence 264 protein | |
| Q66K14_C289 | TBC1D9B TBC1 domain | 9555 |
| | family member 9B | |
| Q16875_C155 | PFKFB3 6-phosphofructo-2- | 9556 |
| | kinase/fructose-2,6- | |
| | bisphosphata | |
| Q9UJX3_C329 | ANAPC7 Anaphase- | 9557 |
| | promoting complex subunit 7 | |
| Q9NR56_C27 | MBNL1 Muscleblind-like | 9558 |
| | protein 1 | |
| Q96L21_C105 | RPL10L 60S ribosomal | 9559 |
| | protein L10-like | |
| P03989_C349 | HLA-B HLA class I histocompatibility | 9560 |
| | antigen, B-27 alpha | |
| Q9Y4W2_C469 | LAS1L Ribosomal biogenesis | 9561 |
| | protein LAS1L | |
| Q9P258_C144 | RCC2 Protein RCC2 | 9562 |
| Q96BX8_C88 | MOB3A MOB kinase | 9563 |
| | activator 3A | |
| Q9BW27_C51 | NUP85 Nuclear pore complex | 9564 |
| | protein Nup85 | |
| Q9H582_C507 | ZNF644 Zinc finger protein | 9565 |
| | 644 | |
| Q9H4A6_C84 | GOLPH3 Golgi | 9566 |
| | phosphoprotein 3 | |
| Q9H4A5_C70 | GOLPH3L Golgi | 9567 |
| | phosphoprotein 3-like | |
| Q96DM3_C333 | C18orf8 Uncharacterized | 9568 |
| | protein C18orf8 | |
| P06239_C378 | LCK Tyrosine-protein kinase | 9569 |
| | Lck | |
| Q95365_C125 | HLA-B HLA class I histocompatibility | 9570 |
| | antigen, B-38 alpha | |
| P30453_C125 | HLA-A HLA class I histocompatibility | 9571 |
| | antigen, A-34 alpha | |
| P30479_C125 | HLA-B HLA class I histocompatibility | 9572 |
| | antigen, B-41 alpha | |
| Q29836_C125 | HLA-B HLA class I histocompatibility | 9573 |
| | antigen, B-67 alpha | |
| P30466_C125 | HLA-B HLA class I histocompatibility | 9574 |
| | antigen, B-18 alpha | |
| P30462_C125 | HLA-B HLA class I histocompatibility | 9575 |
| | antigen, B-14 alpha | |
| P30460_C125 | HLA-B HLA class I histocompatibility | 9576 |
| | antigen, B-8 alpha | |
| P01892_C125 | HLA-A HLA class I histocompatibility | 9577 |
| | antigen, A-2 alpha | |
| Q9H7Z7_C110 | PTGES2 Prostaglandin E | 9578 |
| | synthase 2 | |
| Q8TEU7_C1368 | RAPGEF6 Rap guanine | 9579 |
| | nucleotide exchange factor 6 | |
| Q14CN2_C308 | CLCA4 Calcium-activated | 9580 |
| | chloride channel regulator 4 | |
| Q96FK6_C82 | WDR89 WD repeat-containing | 9581 |
| | protein 89 | |
| Q95365_C188 | HLA-B HLA class I histocompatibility | 9582 |
| | antigen, B-38 alpha | |
| Q29836_C188 | HLA-B HLA class I histocompatibility | 9583 |
| | antigen, B-67 alpha | |
| O14981_C939 | BTAF1 TATA-binding | 9584 |
| | protein-associated factor 172 | |
| Q9NXC5_C799 | MIOS WD repeat-containing | 9585 |
| | protein mio | |
| Q13613_C117 | MTMR1 Myotubularin-related | 9586 |
| | protein 1 | |
| Q8IYL3_C215 | C1orf174 UPF0688 protein | 9587 |
| | C1orf174 | |
| Q14289_C899 | PTK2B Protein-tyrosine | 9588 |
| | kinase 2-beta | |
| P26358_C62 | DNMT1 DNA (cytosine-5)- | 9589 |
| | methyltransferase 1 | |
| Q7RTR2_C561 | NLRC3 Protein NLRC3 | 9590 |
| Q9UKA4_C1488 | AKAP11 A-kinase anchor | 9591 |
| | protein 11 | |
| O76075_C194 | DFFB DNA fragmentation | 9592 |
| | factor subunit beta | |
| O00221_C187 | NFKBIE NF-kappa-B | 9593 |
| | inhibitor epsilon | |
| Q96F46_C703 | IL17RA Interleukin-17 | 9594 |
| | receptor A | |
| P36776_C682 | LONP1 Lon protease | 9595 |
| | homolog, mitochondrial | |
| Q9UGK8_C189 | SERGEF Secretion-regulating | 9596 |
| | guanine nucleotide exchange | |
| | factor | |
| Q9HAV4_C1131 | XPO5 Exportin-5 | 9597 |
| P38646_C366 | HSPA9 Stress-70 protein, | 9598 |
| | mitochondrial | |
| P30084_C213 | ECHS1 Enoyl-CoA hydratase, | 9599 |
| | mitochondrial | |
| Q9Y3P8_C126 | SIT1 Signaling threshold- | 9600 |
| | regulating transmembrane | |
| | adaptor 1 | |
| Q92844_C328 | TANK TRAF family member- | 9601 |
| | associated NF-kappa-B | |
| | activator | |
| Q9NR50_C281 | EIF2B3 Translation initiation | 9602 |
| | factor eIF-2B subunit gamma | |
| P36969_C102 | GPX4 Phospholipid | 9603 |
| | hydroperoxide glutathione | |
| | peroxidase, mitochondrial | |
| P29144_C787 | TPP2 Tripeptidyl-peptidase 2 | 9604 |
| P40121_C282 | CAPG Macrophage-capping | 9605 |
| | protein | |
| Q5JSL3_C592 | DOCK11 Dedicator of | 9606 |
| | cytokinesis protein 11 | |
| P52306_C85 | RAP1GDS1 Rap1 GTPase- | 9607 |
| | GDP dissociation stimulator 1 | |
| P61978_C205 | HNRNPK Heterogeneous | 9608 |
| | nuclear ribonucleoprotein K | |
| P35250_C88 | RFC2 Replication factor C | 9609 |
| | subunit 2 | |
| Q96PY6_C276 | NEK1 Serine/threonine- | 9610 |
| | protein kinase Nek1 | |
| Q9Y5J1_C90 | UTP18 U3 small nucleolar | 9611 |
| | RNA-associated protein 18 | |
| | homolog | |
| O95365_C123 | ZBTB7A Zinc finger and BTB | 9612 |
| | domain-containing protein 7A | |
| Q9ULG1_C1001 | INO80 DNA helicase INO80 | 9613 |
| O95801_C63 | TTC4 Tetratricopeptide repeat | 9614 |
| | protein 4 | |
| P57772_C55 | EEFSEC Selenocysteine- | 9615 |
| | specific elongation factor | |
| Q96FE7_C228 | PIK3IP1 Phosphoinositide-3- | 9616 |
| | kinase-interacting protein 1 | |
| Q92945_C176 | KHSRP Far upstream element- | 9617 |
| | binding protein 2 | |
| P15121_C304 | AKR1B1 Aldose reductase | 9618 |
| Q15149_C3017 | PLEC Plectin | 9619 |
| Q12849_C476 | GRSF1 G-rich sequence factor | 9620 |
| | 1 | |
| P55160_C338 | NCKAP1L Nck-associated | 9621 |
| | protein 1-like | |
| P50990_C430 | CCT8 T-complex protein 1 | 9622 |
| | subunit theta | |
| P53597_C60 | SUCLG1 Succinyl-CoA ligase | 9623 |
| Q9Y277_C229 | VDAC3 Voltage-dependent | 9624 |
| | anion-selective channel protein | |
| P30481_C125 | HLA-B HLA class I histocompatibility | 9625 |
| | antigen, B-44 alpha | |
| P04222_C125 | HLA-C HLA class I histocompatibility | 9626 |
| | antigen, Cw-3 alpha | |
| Q96L91_C162 | EP400 E1A-binding protein | 9627 |
| | p400 | |
| Q9Y4E8_C264 | USP15 Ubiquitin carboxyl- | 9628 |
| | terminal hydrolase 15 | |
| Q8IZH2_C1450 | XRN1 5-3 exoribonuclease 1 | 9629 |
| Q29RF7_C581 | PDS5A Sister chromatid | 9630 |
| | cohesion protein PDS5 | |
| | homolog A | |
| Q3KQU3_C251 | MAP7D1 MAP7 domain- | 9631 |
| | containing protein 1 | |
| O60318_C1864 | MCM3AP 80 kDa MCM3- | 9632 |
| | associated protein | |
| Q9NT62_C182 | ATG3 Ubiquitin-like- | 9633 |
| | conjugating enzyme ATG3 | |
| Q14511_C18 | NEDD9 Enhancer of | 9634 |
| | filamentation 1 | |
| O00139_C406 | KIF2A Kinesin-like protein | 9635 |
| | KIF2A | |
| P09914_C138 | IFIT1 Interferon-induced | 9636 |
| | protein with tetratricopeptide | |
| O60216_C35 | RAD21 Double-strand-break | 9637 |
| | repair protein rad21 homolog | |
| P04222_C345 | HLA-C HLA class I histocompatibility | 9638 |
| | antigen, Cw-3 alpha | |
| P57764_C38 | GSDMD Gasdermin-D | 9639 |
| Q9Y520_C2340 | PRRC2C Protein PRRC2C | 9640 |
| P62913_C150 | RPL11 60S ribosomal protein | 9641 |
| | L11 | |
| Q9Y2Y0_C149 | ARL2BP ADP-ribosylation | 9642 |
| | factor-like protein 2-binding | |
| | protein | |
| Q16514_C143 | TAF12 Transcription initiation | 9643 |
| | factor TFIID subunit 12 | |
| O14526_C571 | FCHO1 FCH domain only | 9644 |
| | protein 1 | |
| Q6F5E8_C1339 | RLTPR Leucine-rich repeat- | 9645 |
| | containing protein 16C | |
| Q9H7N4_C362 | SCAF1 Splicing factor, | 9646 |
| | arginine/serine-rich 19 | |
| Q8WW01_C13 | TSEN15 tRNA-splicing | 9647 |
| | endonuclease subunit Sen15 | |
| O15226_C424 | NKRF NF-kappa-B-repressing | 9648 |
| | factor | |
| P40763_C712 | STAT3 Signal transducer and | 9649 |
| | activator of transcription 3 | |
| Q92608_C1083 | DOCK2 Dedicator of | 9650 |
| | cytokinesis protein 2 | |
| Q8TDZ2_C837 | MICAL1 Protein-methionine | 9651 |
| | sulfoxide oxidase MICAL1 | |
| Q9NRA8_C318 | EIF4ENIF1 Eukaryotic | 9652 |
| | translation initiation factor 4E | |
| | transporter | |
| P29590_C227 | PML Protein PML | 9653 |
| Q9UBU9_C252 | NXF1 Nuclear RNA export | 9654 |
| | factor 1 | |
| P61586_C159 | RHOA Transforming protein | 9655 |
| | RhoA | |

[0551] Table 5 illustrates an exemplary listing of cysteine-containing polypeptides. The cysteine residue of interest is denoted with (*).

TABLE 5

| Protein | | Cysteine | | SEQ |
|---|---|---|---|---|
| Identifier | | Residue | | ID |
| (Accession No.) | Protein Name | Number | Sequence | NO: |
| O75874 | Isocitrate | C269 | MSKKISGGSVVEMQGDEMTRIIWELIKEKLIFPYV | 9656 |
| | dehydrogenase | | ELDLHSYDLGIENRDATNDQVTKDAAEAIKKHNV | |
| | 1 (IDH1) | | GVKCATITPDEKRVEEFKLKQMWKSPNGTIRNIL | |
| | | | GGTVFREAIICKNIPRLVSGWVKPIIIGRHAYGDQY | |
| | | | RATDFVVPGPGKVEITYTPSDGTQKVTYLVHNFE | |
| | | | EGGGVAMGMYNQDKSIEDFAHSSFQMALSKGWP | |
| | | | LYLSTKNTILKKYDGRFKDIFQEIYDKQYKSQFEA | |
| | | | QKIWYEHRLIDDMVAQAMKSEGGFIWAC*KNYD | |
| | | | GDVQSDSVAQGYGSLGMMTSVLVCPDGKTVEAE | |
| | | | AAHGTVTRHYRMYQKGQETSTNPIASIFAWTRGL | |
| | | | AHRAKLDNNKELAFFANALEEVSIETIEAGFMTK | |
| | | | DLAACIKGLPNVQRSDYLNTFEFMDKLGENLKIK | |
| | | | LAQAKL | |
| P48735 | Isocitrate | C308 | MAGYLRVVRSLCRASGSRPAWAPAALTAPTSQE | 9657 |
| | dehdrogenase | | QPRRHYADKRIKVAKPVVEMDGDEMTRIIWQFIK | |
| | 2 (IDH2) | | EKLILPHVDIQLKYFDLGLPNRDQTDDQVTIDSAL | |
| | | | ATQKYSVAVKCATITPDEARVEEFKLKKMWKSP | |
| | | | NGTIRNILGGTVFREPIICKNIPRLVPGWTKPITIGR | |
| | | | HAHGDQYKATDEVADRAGTFKMVFTPKDGSGV | |
| | | | KEWEVYNFPAGGVGMGMYNTDESISGFAHSCFQ | |
| | | | YAIQKKWPLYMSTKNTILICAYDGRFKDIFQEIFDK | |
| | | | HYKTDFDKNKCIWYEHRLIDDMVAQVLKSSGGFV | |
| | | | WAC*KNYDGDVQSDILAQGFGSLGLMTSVLVCP | |
| | | | DGKTIEAEAAHGTVTRHYREHQKGRPTSTNPIA | |
| | | | SIFAWTRGLEHRGKLDGNQDLIRFAQMLEKVCVE | |
| | | | TVESGAMTKDLAGCIHGLSNVKLNEHFLNTTDFL | |
| | | | DTIKSNLDRALGRQ | |
| Q14790 | CASP8 | C360 | MDFSRNLYDIGEQLDSEDLASLKFLSLDYIPQRKQ | 9658 |
| | | | EPIKDALMLFQRLQEKRMLEESNLSFLKELLFRIN | |
| | | | RLDLLITYLNTRKEEMERELQTPGRAQISAYRVM | |
| | | | LYQISEEVSRSELRSFKFLLQEEISKCKLDDDMNLL | |
| | | | DIFIEMEKRVILGEGKLDILKRVCAQINKSLLKIIN | |
| | | | DYEEFSKERSSSLEGSPDEFSNGEELCGVMTISD | |
| | | | SPREQDSESQTLDKVYQMKSICPRGYCLIINNHNF | |
| | | | AKAREKVPKLHSIRDRNGTHLDAGALTTTFEELH | |
| | | | FEIKPHDDCTVEQIYEILKIYQLMDHSNMDCFICCI | |
| | | | LSHGDKGITYGTDGQEAPIYELTSQFTGLKCPSLA | |
| | | | GKPKVFFIQAC*QGDNYQKGIPVETDSEEQPYLE | |
| | | | MDLSSPQTRYIPDEADFLLGMATVNNCVSYRNPA | |
| | | | EGTWYIQSLCQSLRERCPRGDDILTILTEVNYEV | |
| | | | SNKDDKKNMGKQMPQPTFTLRKKLVFPSD | |
| Q92851 | CASP10 | C401 | MKSQGQHWYS SSDKNCKVSF REKLLIIDSN | 9659 |
| | | | LGVQDVENLK FLCIGLVPNKKLEKSSSASD | |
| | | | VFEHLLAEDL LSEEDPFFLA ELLYIIRQKK | |
| | | | LLQHLNCTKE EVERLLPTRQ RVSLFRNLLY | |
| | | | ELSEGIDSENLKDMIFLLKD SLPKTEMTSL | |
| | | | SFLAFLEKQGKIDEDNLTCL EDLCKTVVPK | |
| | | | LLRNIEKYKREKAIQIVTPP VDKEAESYQG | |
| | | | EEELVSQTDVKTFLEALPQE SWQNKHAGSN | |
| | | | GNRATNGAPSLVSRGMQGASANTLNSETSTKRA | |
| | | | AVYRMNRNHRGLCVIVNNHSFTSLKDR | |
| | | | QGTHICDAEILSHVFQWLGET VHIHNNVTKV | |
| | | | EMEMVLQKQKCNPAHADGDCFVFCILTHGRFGA | |
| | | | VYSSDEALIPIREIMSHFTALQCPRLAEKPKLFFIQ | |
| | | | AC*QGEEIQPSVSIEADALNPEQAPTSLQDSIPAEA | |
| | | | DFLLGLATVPGYVSFRHVEEGSWYIQSLCNHLKK | |
| | | | LVPRMLKFLEKTMEIRGRKRTVWGAICQISATSLP | |
| | | | TAISAQTPRPPMRRWSSVS | |
| Q99873 | PRMT1 | C109 | MENFVATLANGMSLQPPLEEVSCGQAESSEICPNA | 9660 |
| | | | EDMTSKDYYFDSYAHEGIHEEMLKDEVRTLTYRN | |
| | | | SMFHNRHLFKDKVVLDVGSGTGILCMFAAKAGA | |
| | | | RKVIGIEC*SSISDYAVKIVKANKLDHVVTIIKGKV | |
| | | | EEVELPVEKVDIIISEWMGYCLFYESMLNTVLYAR | |
| | | | DKWLAPDGLIFPDRATLYVTAIEDRQYKDYKIHW | |
| | | | WENVYGFDMSCIICDVAIKEPLVDVVDPKQLVTN | |
| | | | ACLIKEVDIYTVKVEDLTFTSPFCLQVKRNDYVH | |
| | | | ALVAYFNIEFTRCHKRTGFSTSPESPYTHWKQTVF | |
| | | | YMEDYLTVKTGEEIFGTIGMRPNAKNNRDLDFTI | |
| | | | DLDFKGQLCELSCSTDYRMR | |
| Q9NYL2 | MAP3 kinase | C22 | MSSLGASFVQIKFDDLQFFENC*GGGSFGSVYRA | 9661 |
| | MLTK (or | | KWISQDKEVAVKKLLKIEKEAEILSVLSHRNIIQFY | |
| | ZAK) | | GVILEPPNYGIVTEYASLGSLYDYINSNRSEEMDM | |
| | | | DHIMTWATDVAKGMHYLHMEAPVKVIHRDLKS | |
| | | | RNVVIAADGVLKCDFGASRFHNHTTHMSLVGTT | |
| | | | PWMAPEVIQSLPVSETCDTYSYGVVLWEMLTREV | |
| | | | PFKGLEGLQVAWLVVEKNERLTIPSSCPRSFAELL | |
| | | | HQCWEADAKICRPSFKQIISILESMSNDTSLPDKCN | |
| | | | SFLHNKAEWRCEIEATLERLKKLERDISFKEQELK | |
| | | | ERERRLKMWEQKLTEQSNTPLLPSFEIGAWTEDD | |
| | | | VYCWVQQLVRKGDSSAEMSVYASLFICENNITGK | |
| | | | RLLLLEEEDLKDMGIVSKGHIIHFKSAIEKLTHDYI | |
| | | | NLFHFPPLIKDSGGEPEENEEKIVNLELVFGFHLKP | |
| | | | GTGPQDCKWKMYMEMDGDEIAITYIKDVTFNTN | |
| | | | LPDAEILKMTKPPFVMEKWIVGIAKSQTVECTVT | |
| | | | YESDVRTPKSTKHVHSIQWSRTKPQDEVKAVQLA | |
| | | | IQTLFTNSDGNPGSRSDSSADCQWLDTLRMRQIAS | |
| | | | NTSLQRSQSNPILGSPFFSHFDGQDSYAAAVRRPQ | |
| | | | VPIKYQQITPVNQSRSSSPTQYGLTKNFSSLHLNSR | |
| | | | DSGFSSGNTDTSSERGRYSDRSRNKYGRGSISLNS | |
| | | | SPRGRYSGKSQHSTPSRGRYPGKFYRVSQSALNP | |
| | | | HQSPDFKRSPRDLHQPNTIPGMPLHPETDSRASEE | |
| | | | DSKVSEGGWTKVEYRKKPHRPSPAKTNKERARG | |
| | | | DHRGWRNF | |
| P12268 | IMPDH2 | C140, | MADYLISGGTSYVPDDGLTAQQLFNCGDGLTYN | 9662 |
| | | C331 | DFLILPGYIDFTADQVDLTSALTKKITLKTPLVSSP | |
| | | | MDTVTEAGMAIAMALTGGIGFIHHNCTPEFQANE | |
| | | | VRKVICKYEQGFITDPVVLSPKDRVRDVFEAKARH | |
| | | | GFC*GIPITDTGRMGSRLVGIISSRDIDFLKEEEHDC | |
| | | | FLEEIMTKREDLVVAPAGITLKEANEILQRSICKGK | |
| | | | LPIVNEDDELVAHARTDLKICNRDYPLASKDAKICQ | |
| | | | LLCGAAIGTHEDDKYRLDLLAQAGVDVVVLDSS | |
| | | | QGNSIFQINMIKYIKDKYPNLQVIGGNVVTAAQA | |
| | | | KNLIDAGVDALRVGMGSGSIC*ITQEVLACGRPQ | |
| | | | ATAVYKVSEYARRFGVPVIADGGIQNVGHIAKAL | |
| | | | ALGASTVMMGSLLAATTEAPGEYFFSDGIRLKKY | |
| | | | RGMGSLDAMDKHLSSQNRYFSEADKIKVAQGVS | |
| | | | GAVQDKGSIHKIVPYLIAGIQHSCQDIGAKSLTQV | |
| | | | RAMMYSGELKFEKRTSSAQVEGGVHSLHSYEKR | |
| | | | LF | |
| Q9NQ88 | TIGAR | C114, | MARFALTVVRHGETRFNKEICHQGQGVDEPLSET | 9663 |
| | | C161 | GFKQAAAAGIFLNNVKFTHAFSSDLMRTKQTMH | |
| | | | GILERSICFCICDMTVKYDSRLRERKYGVVEGICALS | |
| | | | ELRAMAKAAREEC*PVFTPPGGETLDQVKMRGID | |
| | | | FFEFLCQLILKEADQKEQFSQGSPSNC*LETSLAEI | |
| | | | FPLGKNHSSKVNSDSGIPGLAASVLVVSHGAYMR | |
| | | | SLFDYFLTDLKCSLPATLSRSELMSVTPNTGMSLFI | |
| | | | INFEEGREVICPTVQCICMNLQDHLNGLTETR | |
| Q04759 | PKCO | C14, C17 | MSPFLRIGLSNFDC*GSC*QSCQGEAVNPYCAVLV | 9664 |
| | | | KEYVESENGQMYIQKKPTMYPPWDSTFDAHINK | |
| | | | GRVMQIIVKGKNVDLISETTVELYSLAERCRKNN | |
| | | | GKTEIWLELKPQGRMLMNARYFLEMSDTKDMNE | |
| | | | FETEGFFALHQRRGAIKQAKVHHVKCHEFTATFF | |
| | | | PQPTFCSVCHEFVWGLNKQGYQCRQCNAAIHICK | |
| | | | CIDKVIAKCTGSAINSRETMFHKERFKIDMPHRFK | |
| | | | VYNYKSPTFCEHCGTLLWGLARQGLKCDACGMN | |
| | | | VHHRCQTKVANLCGINQKLMAEALAMIESTQQ | |
| | | | ARCLRDTEQIFREGPVEIGLPCSIKNEARPPCLPTP | |
| | | | GKREPQGISWESPLDEVDKMCHLPEPELNKERPSL | |
| | | | QIKLKTEDFILHKMLGKGSFGKVFLAEFKKTNQFF | |
| | | | AIKALKKDVVLMDDDVECTMVEKRVLSLAWEHP | |
| | | | FLTHMFCTFQTKENLFFVMEYLNGGDLMYHIQSC | |
| | | | HKFDLSRATFYAAEIILGLQFLHSKGIVYRDLKLD | |
| | | | NILLDKDGHIKIADFGMCKENNILGDAKTNTFCGT | |
| | | | PDYIAPEILLGQKYNHSVDWWSFGVLLYEMLIGQ | |
| | | | SPFHGQDEEELFHSIRMDNPFYPRWLEKEAKDLL | |
| | | | VKLFVREPEKRLGVRGDIRQHPLFREINWEELERK | |
| | | | EIDPPFRPKVKSPFDCSNFDKEFLNEKPRLSFADRA | |
| | | | LINSMDQNMFRNFSFMNPGMERLIS | |
| Q96SW2 | Cereblon | C188, | MAGEGDQQDAAHNMGNHLPLLPAESEEEDEMEV | 9665 |
| | | C287 | EDQDSKEAKKPNIINFDTSLPTSHTYLGADMEEFH | |
| | | | GRTLHDDDSCQVIPVLPQVMMILTPGQTLPLQLFH | |
| | | | PQEVSMVRNLIQKDRTFAVLAYSNVQEREAQFGT | |
| | | | TAEIYAYREEQDFGIEIVKVKAIGRQRFKVLELRT | |
| | | | QSDGIQQAKVQILPEC*VLPSTMSAVQLESLNKCQ | |
| | | | IFPSKPVSREDQCSYKWWQKYQICRKFHCANLTS | |
| | | | WPRWLYSLYDAETLMDRIKKQLREWDENLKDDS | |
| | | | LPSNPIDFSYRVAAC*LPIDDVLRIQLLKIGSAIQRL | |
| | | | RCELDIMNKCTSLCCKQCQETEITTKNEIFSLSLCG | |
| | | | PMAAYVNPHGYVHETLTVYKACNLNLIGRPSTEH | |
| | | | SWFPGYAWTVAQCKKASHIGWKFTATICKDMSP | |
| | | | QKFWGLTRSALLPTIPDTEDEISPDKVILCL | |

[0552] Table 6A-Table 6E illustrate a list of cysteine containing proteins and potential cysteine site of conjugation separated by protein class. Table 6A illustrates cysteine containing enzymes and potential cysteine conjugation site. Table 6B shows a list of cysteine containing transcription factors and regulators. Table 6C shows an exemplary list of cysteine containing channels, transporters and receptors. Table 6D illustrates an exemplary cysteine containing adapter, scaffolding, and modulator protein. Table 6E provides an exemplary list of uncategorized cysteine containing proteins.

TABLE 6A

| | | Cysteine | |
|---|---|---|---|
| Identifier | Protein Name | Location | Protein Class |
| O14920 | IKBKB Inhibitor of nuclear factor kappa-B kinase subunit | C464 | Enzyme |
| O14933 | UBE2L6 Ubiquitin/ISG15-conjugating enzyme E2 L6 PCTK | C98 | Enzyme |
| O94953 | KDM4B Lysine-specific demethylase 4B | C694 | Enzyme |
| P00813 | ADA Adenosine deaminase | C75 | Enzyme |
| P09211 | GSTP1 Glutathione S-transferase P | C48 | Enzyme |
| P15374 | UCHL3 Ubiquitin carboxyl-terminal hydrolase isozyme L3 | C95 | Enzyme |
| P16455 | MGMT Methylated-DNA--protein-cysteine methyltransferase | C145; C150 | Enzyme |
| P17812 | CTP synthase 1 | C491 | Enzyme |
| P19447 | ERCC3 TFIIH basal transcription factor complex helicase | C342 | Enzyme |
| P21580 | TNFAIP3 Tumor necrosis factor alpha-induced protein 3 | C54 | Enzyme |
| P24752 | ACAT1 Acetyl-CoA acetyltransferase, mitochondrial | C119; C126; | Enzyme |
| | | C196; C413 | |
| P40261 | Nicotinamide N-methyltransferase | C165 | Enzyme |
| P41226 | UBA7 Ubiquitin-like modifier-activating enzyme 7 | C599 | Enzyme |
| P42575 | CASP2 Caspase-2 | C370 | Enzyme |
| P43403 | ZAP70 Tyrosine-protein kinase ZAP-70 | C117 | Enzyme |
| P48735 | IDH2 Isocitrate dehydrogenase | C308 | Enzyme |
| P51617 | IRAK1 Interleukin-1 receptor-associated kinase 1 | C608 | Enzyme |
| P61081 | NEDD8-conjugating enzyme Ubc12 | C47 | Enzyme |
| P61088 | Ubiquitin-conjugating enzyme E2 N | C87 | Enzyme |
| P68036 | UBE2L3 Ubiquitin-conjugating enzyme E2 L3 | C86 | Enzyme |
| Q00535 | CDK5 Cyclin-dependent kinase 5 | C157 | Enzyme |
| Q04759 | PRKCQ Protein kinase C theta type | C14; C17 | Enzyme |
| Q06124 | Tyrosine-protein phosphatase non-receptor type 11 | C573 | Enzyme |
| Q09472 | EP300 Histone acetyltransferase p300 | C1738 | Enzyme |
| Q14790 | CASP8 Caspase-8 | C360 | Enzyme |
| Q15084 | PDIA6 Protein disulfide-isomerase A6 | C55; C58; | Enzyme |
| | | C190; C193 | |
| Q15910 | EZH2 Histone-lysine N-methyltransferase EZH2 | C503 | Enzyme |
| Q16763 | UBE2S Ubiquitin-conjugating enzyme E2 S | C118 | Enzyme |
| Q16822 | PCK2 Phosphoenolpyruvate carboxykinase | C306 | Enzyme |
| Q16875 | 6-phosphofructo-2-kinase/fructose-2,6-bisphosphatase 3 | C155 | Enzyme |
| Q16877 | PFKFB4 6-phosphofructo-2-kinase/fructose-2,6-bisphosphata | C159 | Enzyme |
| Q6L8Q7 | PDE12 2,5-phosphodiesterase 12 | C108 | Enzyme |
| Q70CQ2 | USP34 Ubiquitin carboxyl-terminal hydrolase 34 | C741; C1090 | Enzyme |
| Q86UV5 | USP48 Ubiquitin carboxyl-terminal hydrolase 48 | C39 | Enzyme |
| Q92851 | Caspase-10 | C401 | Enzyme |
| Q93009 | USP7 Ubiquitin carboxyl-terminal hydrolase 7 | C223; C315 | Enzyme |
| Q96FA3 | PELI1 E3 ubiquitin-protein ligase pellino homolog 1 | C282 | Enzyme |
| Q96JH7 | VCPIP1 Deubiquitinating protein VCIP135 | C219 | Enzyme |
| Q96RU2 | USP28 Ubiquitin carboxyl-terminal hydrolase 28 | C171; C733 | Enzyme |
| Q99873 | PRMT1 Protein arginine N-methyltransferase 1 | C109 | Enzyme |
| Q9C0C9 | UBE2O Ubiquitin-conjugating enzyme E2 O | C375 | Enzyme |
| Q9NRW4 | Dual specificity protein phosphatase 22 | C124 | Enzyme |
| Q9NWZ3 | IRAK4 Interleukin-1 receptor-associated kinase 4 | C13 | Enzyme |
| Q9NYL2 | MLTK Mitogen-activated protein kinase kinase kinase MLT | C22 | Enzyme |
| Q9UPT9 | USP22 Ubiquitin carboxyl-terminal hydrolase 22 | C44; C71 | Enzyme |
| Q9Y3Z3 | SAMHD1 SAM domain and HD domain-containing protein 1 | C522 | Enzyme |
| Q9Y4C1 | KDM3A Lysine-specific demethylase 3A | C251 | Enzyme |
| Q9Y5T5 | USP16 Ubiquitin carboxyl-terminal hydrolase 16 | C205 | Enzyme |

TABLE 6B

| | | Cysteine | |
|---|---|---|---|
| Identifier | Protein Name | Location | Protein Class |
| O75362 | ZNF217 Zinc finger protein 217 | C286 | Transcription |
| | | | factors and |
| | | | regulators |
| P04150 | NR3C1 Glucocorticoid receptor | C302; C622 | Transcription |
| | | | factors and |
| | | | regulators |
| P09086 | POU2F2 POU domain, class 2, transcription factor 2 | C346 | Transcription |
| | | | factors and |
| | | | regulators |
| P40763 | STAT3 Signal transducer and activator of transcription 3 | C259 | Transcription |
| | | | factors and |
| | | | regulators |
| P48200 | IREB2 Iron-responsive element-binding protein 2 | C137 | Transcription |
| | | | factors and |
| | | | regulators |
| Q01201 | RELB Transcription factor RelB | C109 | Transcription |
| | | | factors and |
| | | | regulators |
| Q02556 | IRF8 Interferon regulatory factor 8 | C306 | Transcription |
| | | | factors and |
| | | | regulators |
| Q15306 | IRF4 Interferon regulatory factor 4 | C194 | Transcription |
| | | | factors and |
| | | | regulators |
| Q7Z2W4 | ZC3HAV1 Zinc finger CCCH-type antiviral protein 1 | C645 | Transcription |
| | | | factors and |
| | | | regulators |
| Q8TAQ2 | SMARCC2 SWI/SNF complex subunit SMARCC2 | C145 | Transcription |
| | | | factors and |
| | | | regulators |

TABLE 6C

| | | Cysteine | |
|---|---|---|---|
| Identifier | Protein Name | Location | Protein Class |
| P63244 | GNB2L1 Guanine nucleotide-binding protein subunit | C182 | Channels, |
| | beta-2-like 1 | | Transporters, |
| | | | Receptors |
| Q16186 | Proteasomal ubiquitin receptor ADRM1 | C88 | Channels, |
| | | | Transporters, |
| | | | Receptors |
| Q9HB90 | RRAGC Ras-related GTP-binding protein C | C358; C377 | Channels, |
| | | | transporters, |
| | | | and receptors |

TABLE 6D

| | | Cysteine | |
|---|---|---|---|
| Identifier | Protein Name | Location | Protein Class |
| P14598 | NCF1 Neutrophil cytosol factor 1 | C378 | Adapter, |
| | | | scaffolding, |
| | | | modulator proteins |

TABLE 6E

| | | Cysteine | |
|---|---|---|---|
| Identifier | Protein Name | Location | Protein Class |
| O00170 | AIP AH receptor-interacting protein | C122 | Uncategorized |
| O00541 | PES1 Pescadillo homolog | C272; C361 | Uncategorized |
| O00622 | CYR61 Protein CYR61 | C39; C70; | Uncategorized |
| | | C134 | |
| O14980 | XPO1 Exportin-1 | C34; C528; | Uncategorized |
| | | C1070 | |
| P50851 | LRBA Lipopolysaccharide-responsive and beige-like | C1704; C2675 | Uncategorized |
| | anchor protein | | |
| Q96GG9 | DCUN1D1 DCN1-like protein 1 | C115 | Uncategorized |

[0553] While preferred embodiments of the present disclosure have been shown and described herein, it will be obvious to those skilled in the art that such embodiments are provided by way of example only. Numerous variations, changes, and substitutions will now occur to those skilled in the art without departing from the disclosure. It should be understood that various alternatives to the embodiments of the disclosure described herein may be employed in practicing the disclosure. It is intended that the following claims define the scope of the disclosure and that methods within the scope of these claims and their equivalents be covered thereby.

The application's sequence listing, which the Patent Office published only in electronic form, follows.

SEQUENCE LISTING (9665 sequences)

SEQ ID NO: 1 - protein, 14 aa, Homo sapiens
  Table 1 sequence identifier: P23396_C97
  MOD_RES (4)..(4): May or may not be conjugated to a chemical probe
RGLCAIAQAESLRY

SEQ ID NO: 2 - protein, 26 aa, Homo sapiens
  Table 1 sequence identifier: P68366_C295
  MOD_RES (16)..(16): May or may not be conjugated to a chemical probe
KAYHEQLSVAEITNACFEPANQMVKC

SEQ ID NO: 3 - protein, 16 aa, Homo sapiens
  Table 1 sequence identifier: P68366_C347
  MOD_RES (10)..(10): May or may not be conjugated to a chemical probe
KRSIQFVDWCPTGFKV

SEQ ID NO: 4 - protein, 16 aa, Homo sapiens
  Table 1 sequence identifier: Q71U36_C347
  MOD_RES (10)..(10): May or may not be conjugated to a chemical probe
KRTIQFVDWCPTGFKV

SEQ ID NO: 5 - protein, 19 aa, Homo sapiens
  Table 1 sequence identifier: Q71U36_C376
  MOD_RES (4)..(4): May or may not be conjugated to a chemical probe
RAVCMLSNTTAIAEAWARL

SEQ ID NO: 6 - protein, 30 aa, Homo sapiens
  Table 1 sequence identifier: Q7L1Q6_C35
  MOD_RES (12)..(12): May or may not be conjugated to a chemical probe
KERFDPTQFQDCIIQGLTETGTDLEAVAKF

SEQ ID NO: 7 - protein, 19 aa, Homo sapiens
  Table 1 sequence identifier: P04406_C152
  MOD_RES (8)..(8): May or may not be conjugated to a chemical probe
KIISNASCTTNCLAPLAKV

SEQ ID NO: 8 - protein, 17 aa, Homo sapiens
  Table 1 sequence identifier: Q99873_C109
  MOD_RES (7)..(7): May or may not be conjugated to a chemical probe
KVIGIECSSISDYAVKI

SEQ ID NO: 9 - protein, 16 aa, Homo sapiens
  Table 1 sequence identifier: Q15365_C109
  MOD_RES (9)..(9): May or may not be conjugated to a chemical probe
RLVVPATQCGSLIGKG

SEQ ID NO: 10 - protein, 24 aa, Homo sapiens
  Table 1 sequence identifier: Q13526_C113
  MOD_RES (19)..(19): May or may not be conjugated to a chemical probe
KIKSGEEDFESLASQFSDCSSAKA

SEQ ID NO: 11 - protein, 21 aa, Homo sapiens
  Table 1 sequence identifier: Q9Y266_C188
  MOD_RES (16)..(16): May or may not be conjugated to a chemical probe
RWTQTLSELDLAVPFCVNFRL

SEQ ID NO: 12 - protein, 18 aa, Homo sapiens
  Table 1 sequence identifier: Q9Y696_C35
  MOD_RES (12)..(12): May or may not be conjugated to a chemical probe
KAGSDGESIGNCPFSQRL

SEQ ID NO: 13 - protein, 21 aa, Homo sapiens
  Table 1 sequence identifier: P24752_C119
  MOD_RES (15)..(15): May or may not be conjugated to a chemical probe
RQAVLGAGLPISTPCTTINKV

SEQ ID NO: 14 - protein, 19 aa, Homo sapiens
  Table 1 sequence identifier: P10809_C442
  MOD_RES (14)..(14): May or may not be conjugated to a chemical probe
RAAVEEGIVLGGGCALLRC

SEQ ID NO: 15 - protein, 11 aa, Homo sapiens
  Table 1 sequence identifier: P68366_C315
  MOD_RES (5)..(5): May or may not be conjugated to a chemical probe
KYMACCLLYRG

SEQ ID NO: 16 - protein, 12 aa, Homo sapiens
  Table 1 sequence identifier: P09211_C48
  MOD_RES (4)..(4): May or may not be conjugated to a chemical probe
KASCLYGQLPKF

SEQ ID NO: 17 - protein, 21 aa, Homo sapiens
  Table 1 sequence identifier: Q86SX6_C67
  MOD_RES (9)..(9): May or may not be conjugated to a chemical probe
KGTPEQPQCGFSNAVVQILRL

SEQ ID NO: 18 - protein, 12 aa, Homo sapiens
  Table 1 sequence identifier: P13639_C41
  MOD_RES (10)..(10): May or may not be conjugated to a chemical probe
KSTLTDSLVCKA

SEQ ID NO: 19 - protein, 24 aa, Homo sapiens
  Table 1 sequence identifier: O14980_C34
  MOD_RES (13)..(13): May or may not be conjugated to a chemical probe
KLDINLLDNVVNCLYHGEGAQQRM

SEQ ID NO: 20 - protein, 25 aa, Homo sapiens
  Table 1 sequence identifier: Q15365_C194
  MOD_RES (18)..(18): May or may not be conjugated to a chemical probe
RVMTIPYQPMPASSPVICAGGQDRC

SEQ ID NO: 21 - protein, 29 aa, Homo sapiens
  Table 1 sequence identifier: Q99832_C29
  MOD_RES (20)..(20): May or may not be conjugated to a chemical probe
KEGTDSSQGIPQLVSNISACQVIAEAVRT

SEQ ID NO: 22 - protein, 12 aa, Homo sapiens
  Table 1 sequence identifier: P62280_C60
  MOD_RES (2)..(2): May or may not be conjugated to a chemical probe
KCPFTGNVSIRG

SEQ ID NO: 23 - protein, 9 aa, Homo sapiens
  Table 1 sequence identifier: P78417_C32
  MOD_RES (3)..(3): May or may not be conjugated to a chemical probe
RFCPFAERT

SEQ ID NO: 24 - protein, 14 aa, Homo sapiens
  Table 1 sequence identifier: P24752_C196
  MOD_RES (7)..(7): May or may not be conjugated to a chemical probe
KIHMGSCAENTAKK

SEQ ID NO: 25 - protein, 17 aa, Homo sapiens
  Table 1 sequence identifier: P10599_C32
  MOD_RES (12)..(12): May or may not be conjugated to a chemical probe
KLVVVDFSATWCGPCKM

SEQ ID NO: 26 - protein, 18 aa, Homo sapiens
  Table 1 sequence identifier: P50990_C244
  MOD_RES (7)..(7): May or may not be conjugated to a chemical probe
KIAVYSCPFDGMITETKG

SEQ ID NO: 27 - protein, 28 aa, Homo sapiens
  Table 1 sequence identifier: P13667_C206
  MOD_RES (23)..(23): May or may not be conjugated to a chemical probe
KENFDEVVNDADIILVEFYAPWCGHCKK

SEQ ID NO: 28 - protein, 13 aa, Homo sapiens
  Table 1 sequence identifier: P55735_C187
  MOD_RES (7)..(7): May or may not be conjugated to a chemical probe
RFASGGCDNLIKL

SEQ ID NO: 29 - protein, 19 aa, Homo sapiens
  Table 1 sequence identifier: Q15185_C58
  MOD_RES (11)..(11): May or may not be conjugated to a chemical probe
KHLNEIDLFHCIDPNDSKH

SEQ ID NO: 30 - protein, 13 aa, Homo sapiens
  Table 1 sequence identifier: P55263_C353
  MOD_RES (4)..(4): May or may not be conjugated to a chemical probe
RTGCTFPEKPDFH

SEQ ID NO: 31 - protein, 10 aa, Homo sapiens
  Table 1 sequence identifier: P46782_C66
  MOD_RES (4)..(4): May or may not be conjugated to a chemical probe
KAQCPIVERL

SEQ ID NO: 32 - protein, 16 aa, Homo sapiens
  Table 1 sequence identifier: Q99439_C164
  MOD_RES (5)..(5): May or may not be conjugated to a chemical probe
KAGQCVIGLQMGTNKC

SEQ ID NO: 33 - protein, 26 aa, Homo sapiens
  Table 1 sequence identifier: P13639_C136
  MOD_RES (17)..(17): May or may not be conjugated to a chemical probe
RVTDGALVVVDCVSGVCVQTETVLRQ

SEQ ID NO: 34 - protein, 26 aa, Homo sapiens
  Table 1 sequence identifier: Q2TAA2_C137
  MOD_RES (11)..(11): May or may not be conjugated to a chemical probe
RVILITPTPLCETAWEEQCIIQGCKL

SEQ ID NO: 35 - protein, 24 aa, Homo sapiens
  Table 1 sequence identifier: P30044_C204
  MOD_RES (14)..(14): May or may not be conjugated to a chemical probe
KALNVEPDGTGLTCSLAPNIISQL

SEQ ID NO: 36 - protein, 15 aa, Homo sapiens
  Table 1 sequence identifier: P12268_C140
  MOD_RES (5)..(5): May or may not be conjugated to a chemical probe
RHGFCGIPITDTGRM

SEQ ID NO: 37 - protein, 16 aa, Homo sapiens
  Table 1 sequence identifier: Q99714_C214
  MOD_RES (3)..(3): May or may not be conjugated to a chemical probe
KVCNFLASQVPFPSRL

SEQ ID NO: 38 - protein, 12 aa, Homo sapiens
  Table 1 sequence identifier: Q9NQR4_C153
  MOD_RES (7)..(7): May or may not be conjugated to a chemical probe
RVGLGICYDMRF

SEQ ID NO: 39 - protein, 13 aa, Homo sapiens
  Table 1 sequence identifier: P15121_C299
  MOD_RES (3)..(3): May or may not be conjugated to a chemical probe
RVCALLSCTSHKD

SEQ ID NO: 40 - protein, 20 aa, Homo sapiens
  Table 1 sequence identifier: Q6UB35_C906
  MOD_RES (16)..(16): May or may not be conjugated to a chemical probe
KIDRYTQQGFGNLPICMAKT

SEQ ID NO: 41 - protein, 27 aa, Homo sapiens
  Table 1 sequence identifier: P07437_C239
  MOD_RES (24)..(24): May or may not be conjugated to a chemical probe
KLTTPTYGDLNHLVSATMSGVTTCLRF

SEQ ID NO: 42 - protein, 25 aa, Homo sapiens
  Table 1 sequence identifier: Q15084_C55
  MOD_RES (19)..(19): May or may not be conjugated to a chemical probe
REVIQSDSLWLVEFYAPWCGHCQRL

SEQ ID NO: 43 - protein, 13 aa, Homo sapiens
  Table 1 sequence identifier: P14618_C423
  MOD_RES (2)..(2): May or may not be conjugated to a chemical probe
KCCSGAIIVLTKS

SEQ ID NO: 44 - protein, 29 aa, Homo sapiens
  Table 1 sequence identifier: P62266_C90
  MOD_RES (11)..(11): May or may not be conjugated to a chemical probe
KITAFVPNDGCLNFIEENDEVLVAGFGRK

SEQ ID NO: 45 - protein, 41 aa, Homo sapiens
  Table 1 sequence identifier: Q71U36_C20
  MOD_RES (20)..(20): May or may not be conjugated to a chemical probe
MRECISIHVGQAGVQIGNACWELYCLEHGIQPDGQMPSDKT

SEQ ID NO: 46 - protein, 11 aa, Homo sapiens
  Table 1 sequence identifier: O95336_C32
  MOD_RES (4)..(4): May or may not be conjugated to a chemical probe
RAACCLAGARA

SEQ ID NO: 47 - protein, 25 aa, Homo sapiens
  Table 1 sequence identifier: P24752_C413
  MOD_RES (11)..(11): May or may not be conjugated to a chemical probe
KQGEYGLASICNGGGGASAMLIQKL

SEQ ID NO: 48 - protein, 14 aa, Homo sapiens
  Table 1 sequence identifier: P62701_C41
  MOD_RES (5)..(5): May or may not be conjugated to a chemical probe
KLRECLPLIIFLRN

SEQ ID NO: 49 - protein, 22 aa, Homo sapiens
  Table 1 sequence identifier: P62829_C28
  MOD_RES (14)..(14): May or may not be conjugated to a chemical probe
RISLGLPVGAVINCADNTGAKN

SEQ ID NO: 50 - protein, 40 aa, Homo sapiens
  Table 1 sequence identifier: Q71U36_C25
  MOD_RES (24)..(24): May or may not be conjugated to a chemical probe
RECISIHVGQAGVQIGNACWELYCLEHGIQPDGQMPSDKT

SEQ ID NO: 51 - protein, 32 aa, Homo sapiens
  Table 1 sequence identifier: Q96HE7_C166
  MOD_RES (10)..(10): May or may not be conjugated to a chemical probe
KHDDSSDNFCEADDIQSPEAEYVDLLLNPERY

SEQ ID NO: 52 - protein, 31 aa, Homo sapiens
  Table 1 sequence identifier: Q96HE7_C241
  MOD_RES (27)..(27): May or may not be conjugated to a chemical probe
KRPLNPLASGQGTSEENTFYSWLEGLCVEKR

SEQ ID NO: 53 - protein, 16 aa, Homo sapiens
  Table 1 sequence identifier: Q9BRA2_C43
  MOD_RES (4)..(4): May or may not be conjugated to a chemical probe
KSWCPDCVQAEPVVRE

SEQ ID NO: 54 - protein, 17 aa, Homo sapiens
  Table 1 sequence identifier: P13667_C555
  MOD_RES (12)..(12): May or may not be conjugated to a chemical probe
KDVLIEFYAPWCGHCKQ

SEQ ID NO: 55 - protein, 17 aa, Homo sapiens
  Table 1 sequence identifier: P30101_C406
  MOD_RES (12)..(12): May or may not be conjugated to a chemical probe
KDVLIEFYAPWCGHCKN

SEQ ID NO: 56 - protein, 11 aa, Homo sapiens
  Table 1 sequence identifier: P07437_C354
  MOD_RES (5)..(5): May or may not be conjugated to a chemical probe
KTAVCDIPPRG

SEQ ID NO: 57 - protein, 10 aa, Homo sapiens
  Table 1 sequence identifier: P83731_C36
  MOD_RES (2)..(2): May or may not be conjugated to a chemical probe
KCESAFLSKR

SEQ ID NO: 58 - protein, 10 aa, Homo sapiens
  Table 1 sequence identifier: Q9ULV4_C420
  MOD_RES (2)..(2): May or may not be conjugated to a chemical probe
KCDLISIPKK

SEQ ID NO: 59 - protein, 10 aa, Homo sapiens
  Table 1 sequence identifier: P42677_C77
  MOD_RES (6)..(6): May or may not be conjugated to a chemical probe
RLTEGCSFRR

SEQ ID NO: 60 - protein, 11 aa, Homo sapiens
  Table 1 sequence identifier: O00299_C24
  MOD_RES (5)..(5): May or may not be conjugated to a chemical probe
KIGNCPFSQRL

SEQ ID NO: 61 - protein, 13 aa, Homo sapiens
  Table 1 sequence identifier: P49458_C48
  MOD_RES (8)..(8): May or may not be conjugated to a chemical probe
KVTDDLVCLVYKT

SEQ ID NO: 62 - protein, 21 aa, Homo sapiens
  Table 1 sequence identifier: P42765_C92
  MOD_RES (3)..(3): May or may not be conjugated to a chemical probe
RLCGSGFQSIVNGCQEICVKE

SEQ ID NO: 63 - protein, 13 aa, Homo sapiens
  Table 1 sequence identifier: Q15233_C145
  MOD_RES (4)..(4): May or may not be conjugated to a chemical probe
RFACHSASLTVRN

SEQ ID NO: 64 - protein, 31 aa, Homo sapiens
  Table 1 sequence identifier: P50570_C27
  MOD_RES (13)..(13): May or may not be conjugated to a chemical probe
KLQDAFSSIGQSCHLDLPQIAVVGGQSAGKS

SEQ ID NO: 65 - protein, 21 aa, Homo sapiens
  Table 1 sequence identifier: P25205_C119
  MOD_RES (6)..(6): May or may not be conjugated to a chemical probe
RTLTSCFLSCVVCVEGIVTKC

SEQ ID NO: 66 - protein, 13 aa, Homo sapiens
  Table 1 sequence identifier: Q5TFE4_C119
  MOD_RES (11)..(11): May or may not be conjugated to a chemical probe
KHFLSDTGMACRS

SEQ ID NO: 67 - protein, 15 aa, Homo sapiens
  Table 1 sequence identifier: Q99439_C215
  MOD_RES (2)..(2): May or may not be conjugated to a chemical probe
KCASQVGMTAPGTRR

SEQ ID NO: 68 - protein, 13 aa, Homo sapiens
  Table 1 sequence identifier: Q06323_C22
  MOD_RES (10)..(10): May or may not be conjugated to a chemical probe
KVDVFREDLCTKT

SEQ ID NO: 69 - protein, 15 aa, Homo sapiens
  Table 1 sequence identifier: P49591_C438
  MOD_RES (4)..(4): May or may not be conjugated to a chemical probe
RTICAILENYQTEKG

SEQ ID NO: 70 - protein, 13 aa, Homo sapiens
  Table 1 sequence identifier: Q96RS6_C376
  MOD_RES (6)..(6): May or may not be conjugated to a chemical probe
RDSAQCAAIAERL

SEQ ID NO: 71 - protein, 34 aa, Homo sapiens
  Table 1 sequence identifier: Q71U36_C129
  MOD_RES (6)..(6): May or may not be conjugated to a chemical probe
KLADQCTGLQGFLVFHSFGGGTGSGFTSLLMERL

SEQ ID NO: 72 - protein, 12 aa, Homo sapiens
  Table 1 sequence identifier: Q9BXJ9_C721
  MOD_RES (8)..(8): May or may not be conjugated to a chemical probe
RLFNTAVCESKD

SEQ ID NO: 73 - protein, 13 aa, Homo sapiens
  Table 1 sequence identifier: P33240_C150
  MOD_RES (3)..(3): May or may not be conjugated to a chemical probe
KLCVQNSPQEARN

SEQ ID NO: 74 - protein, 38 aa, Homo sapiens
  Table 1 sequence identifier: Q13155_C291
  MOD_RES (27)..(27): May or may not be conjugated to a chemical probe
KSPWLAGNELTVADVVLWSVLQQIGGCSVTVPANVQRW

SEQ ID NO: 75 - protein, 13 aa, Homo sapiens
  Table 1 sequence identifier: O75663_C87
  MOD_RES (4)..(4): May or may not be conjugated to a chemical probe
KVACAEEWQESRT

SEQ ID NO: 76 - protein, 10 aa, Homo sapiens
  Table 1 sequence identifier: P63244_C182
  MOD_RES (8)..(8): May or may not be conjugated to a chemical probe
KVWNLANCKL

SEQ ID NO: 77 - protein, 21 aa, Homo sapiens
  Table 1 sequence identifier: Q7L2H7_C134
  MOD_RES (6)..(6): May or may not be conjugated to a chemical probe
KVAASCGAIQYIPTELDQVRK

SEQ ID NO: 78 - protein, 30 aa, Homo sapiens
  Table 1 sequence identifier: P49327_C2359
  MOD_RES (6)..(6): May or may not be conjugated to a chemical probe
KLTPGCEAEAETEAICFFVQQFTDMEHNRV

SEQ ID NO: 79 - protein, 38 aa, Homo sapiens
  Table 1 sequence identifier: P42166_C561
  MOD_RES (27)..(27): May or may not be conjugated to a chemical probe
KVDDEILGFISEATPLGGIQAASTESCNQQLDLALCRA

SEQ ID NO: 80 - protein, 9 aa, Homo sapiens
  Table 1 sequence identifier: P24752_C126
  MOD_RES (3)..(3): May or may not be conjugated to a chemical probe
KVCASGMKA

SEQ ID NO: 81 - protein, 13 aa, Homo sapiens
  Table 1 sequence identifier: P36578_C96
  MOD_RES (11)..(11): May or may not be conjugated to a chemical probe
RSGQGAFGNMCRG

SEQ ID NO: 82 - protein, 10 aa, Homo sapiens
  Table 1 sequence identifier: Q9NXG2_C31
  MOD_RES (3)..(3): May or may not be conjugated to a chemical probe
RRCDAGGPRQ

SEQ ID NO: 83 - protein, 18 aa, Homo sapiens
  Table 1 sequence identifier: P07237_C397
  MOD_RES (13)..(13): May or may not be conjugated to a chemical probe
KKNVFVEFYAPWCGHCKQ

SEQ ID NO: 84 - protein, 15 aa, Homo sapiens
  Table 1 sequence identifier: P27707_C9
  MOD_RES (3)..(3): May or may not be conjugated to a chemical probe
RSCPSFSASSEGTRI

SEQ ID NO: 85 - protein, 9 aa, Homo sapiens
  Table 1 sequence identifier: O00303_C256
  MOD_RES (3)..(3): May or may not be conjugated to a chemical probe
KTCFSPNRV

SEQ ID NO: 86 - protein, 32 aa, Homo sapiens
  Table 1 sequence identifier: Q9UNH7_C264
  MOD_RES (26)..(26): May or may not be conjugated to a chemical probe
KSAADDYNRIGSSLYALGTQDSTDICKFFLKV

SEQ ID NO: 87 - protein, 36 aa, Homo sapiens
  Table 1 sequence identifier: Q15084_C190
  MOD_RES (31)..(31): May or may not be conjugated to a chemical probe
KDVIELTDDSFDKNVLDSEDVWMVEFYAPWCGHCKN

SEQ ID NO: 88 - protein, 11 aa, Homo sapiens
  Table 1 sequence identifier: O43390_C99
  MOD_RES (6)..(6): May or may not be conjugated to a chemical probe
KSAFLCGVMKT

SEQ ID NO: 89 - protein, 45 aa, Homo sapiens
  Table 1 sequence identifier: Q96JB2_C65
  MOD_RES (19)..(19): May or may not be conjugated to a chemical probe
KAAAENLPVPAELPIEDLCSLTSQSLPIELTSVVPESTEDILLKG

SEQ ID NO: 90 - protein, 10 aa, Homo sapiens
  Table 1 sequence identifier: P46109_C249
  MOD_RES (5)..(5): May or may not be conjugated to a chemical probe
KRVPCAYDKT

SEQ ID NO: 91 - protein, 18 aa, Homo sapiens
  Table 1 sequence identifier: P62888_C92
  MOD_RES (3)..(3): May or may not be conjugated to a chemical probe
RVCTLAIIDPGDSDIIRS

SEQ ID NO: 92 - protein, 29 aa, Homo sapiens
  Table 1 sequence identifier: Q9NUY8_C283
  MOD_RES (26)..(26): May or may not be conjugated to a chemical probe
KFLENTPSSLNIEDIEDLFSLAQYYCSKT

SEQ ID NO: 93 - protein, 26 aa, Homo sapiens
  Table 1 sequence identifier: Q09161_C44
  MOD_RES (4)..(4): May or may not be conjugated to a chemical probe
KSACSLESNLEGLAGVLEADLPNYKS

SEQ ID NO: 94 - protein, 19 aa, Homo sapiens
  Table 1 sequence identifier: Q9UJW0_C258
  MOD_RES (11)..(11): May or may not be conjugated to a chemical probe
RLLQPDFQPVCASQLYPRH

SEQ ID NO: 95 - protein, 37 aa, Homo sapiens
  Table 1 sequence identifier: O15294_C758
  MOD_RES (2)..(2): May or may not be conjugated to a chemical probe
KCPDGGDNADSSNTALNMPVIPMNTIAEAVIEMINRG

SEQ ID NO: 96 - protein, 28 aa, Homo sapiens
  Table 1 sequence identifier: P38646_C317
  MOD_RES (4)..(4): May or may not be conjugated to a chemical probe
KAKCELSSSVQTDINLPYLTMDSSGPKH

SEQ ID NO: 97 - protein, 16 aa, Homo sapiens
  Table 1 sequence identifier: Q9HA64_C24
  MOD_RES (10)..(10): May or may not be conjugated to a chemical probe
RATGHSGGGCISQGRS

SEQ ID NO: 98 - protein, 55 aa, Homo sapiens
  Table 1 sequence identifier: Q9Y6G9_C51
  MOD_RES (46)..(46): May or may not be conjugated to a chemical probe
RVGSFGSSPPGLSSTYTGGPLGNEIASGNGGAAAGDDEDGQNLWSCILSEVSTRS

SEQ ID NO: 99 - protein, 15 aa, Homo sapiens
  Table 1 sequence identifier: P52597_C267
  MOD_RES (6)..(6): May or may not be conjugated to a chemical probe
RDLSYCLSGMYDHRY

SEQ ID NO: 100 - protein, 25 aa, Homo sapiens
  Table 1 sequence identifier: Q99497_C106
  MOD_RES (8)..(8): May or may not be conjugated to a chemical probe
KGLIAAICAGPTALLAHEIGFGSKV

SEQ ID NO: 101 - protein, 26 aa, Homo sapiens
  Table 1 sequence identifier: P57764_C268
  MOD_RES (2)..(2): May or may not be conjugated to a chemical probe
RCLHNFLTDGVPAEGAFTEDFQGLRA

SEQ ID NO: 102 - protein, 12 aa, Homo sapiens
  Table 1 sequence identifier: A6NDG6_C297
  MOD_RES (8)..(8): May or may not be conjugated to a chemical probe
KNNQESDCVSKK

SEQ ID NO: 103 - protein, 16 aa, Homo sapiens
  Table 1 sequence identifier: Q14566_C301
  MOD_RES (7)..(7): May or may not be conjugated to a chemical probe
RLVFLACCVAPTNPRF

SEQ ID NO: 104 - protein, 18 aa, Homo sapiens
  Table 1 sequence identifier: Q00610_C870
  MOD_RES (6)..(6): May or may not be conjugated to a chemical probe
RIHEGCEEPATHNALAKI

SEQ ID NO: 105 - protein, 33 aa, Homo sapiens
  Table 1 sequence identifier: Q96T76_C848
  MOD_RES (26)..(26): May or may not be conjugated to a chemical probe
RLMGLLSDPELGPAAADGFSLLMSDCTDVLTRA

SEQ ID NO: 106 - protein, 12 aa, Homo sapiens
  Table 1 sequence identifier: P61158_C235
  MOD_RES (6)..(6): May or may not be conjugated to a chemical probe
RYSYVCPDLVKE

SEQ ID NO: 107 - protein, 10 aa, Homo sapiens
  Table 1 sequence identifier: P23528_C80
  MOD_RES (8)..(8): May or may not be conjugated to a chemical probe
KMLPDKDCRY

SEQ ID NO: 108 - protein, 31 aa, Homo sapiens
  Table 1 sequence identifier: Q9NQ88_C161
  MOD_RES (17)..(17): May or may not be conjugated to a chemical probe
KEADQKEQFSQGSPSNCLETSLAEIFPLGKN

SEQ ID NO: 109 - protein, 26 aa, Homo sapiens
  Table 1 sequence identifier: Q9UKF6_C498
  MOD_RES (11)..(11): May or may not be conjugated to a chemical probe
RNFNYHILSPCDLSNYTDLAMSTVKQ

SEQ ID NO: 110 - protein, 14 aa, Homo sapiens
  Table 1 sequence identifier: Q8TAQ2_C145
  MOD_RES (7)..(7): May or may not be conjugated to a chemical probe
RPNIFLCPEIEPKL

SEQ ID NO: 111 - protein, 20 aa, Homo sapiens
  Table 1 sequence identifier: P68036_C86
  MOD_RES (5)..(5): May or may not be conjugated to a chemical probe
KGQVCLPVISAENWKPATKT

SEQ ID NO: 112 - protein, 16 aa, Homo sapiens
  Table 1 sequence identifier: Q9Y3A3_C134
  MOD_RES (9)..(9): May or may not be conjugated to a chemical probe
RHTLDGAACLLNSNKY

SEQ ID NO: 113 - protein, 10 aa, Homo sapiens
  Table 1 sequence identifier: P49588_C773
  MOD_RES (2)..(2): May or may not be conjugated to a chemical probe
KCLSVMEAKV

SEQ ID NO: 114 - protein, 13 aa, Homo sapiens
  Table 1 sequence identifier: Q96IJ6_C389
  MOD_RES (11)..(11): May or may not be conjugated to a chemical probe
KLLPAITILGCRV

SEQ ID NO: 115 - protein, 11 aa, Homo sapiens
  Table 1 sequence identifier: P27635_C105
  MOD_RES (5)..(5): May or may not be conjugated to a chemical probe
KMLSCAGADRL

SEQ ID NO: 116 - protein, 9 aa, Homo sapiens
  Table 1 sequence identifier: O15145_C162
  MOD_RES (5)..(5): May or may not be conjugated to a chemical probe
KWWTCFVKR

SEQ ID NO: 117 - protein, 16 aa, Homo sapiens
  Table 1 sequence identifier: P48643_C253
  MOD_RES (7)..(7): May or may not be conjugated to a chemical probe
KIAILTCPFEPPKPKT

SEQ ID NO: 118 - protein, 44 aa, Homo sapiens
  Table 1 sequence identifier: P11586_C918
  MOD_RES (27)..(27): May or may not be conjugated to a chemical probe
RASVGAGFLYPLVGTMSTMPGLPTRPCFYDIDLDPETEQVNGLF

SEQ ID NO: 119 - protein, 22 aa, Homo sapiens
  Table 1 sequence identifier: Q96GX2_C75
  MOD_RES (5)..(5): May or may not be conjugated to a chemical probe
RLPLCSLPGEPGNGPDQQLQRS

SEQ ID NO: 120 - protein, 13 aa, Homo sapiens
  Table 1 sequence identifier: P17987_C76
  MOD_RES (4)..(4): May or may not be conjugated to a chemical probe
KVLCELADLQDKE

SEQ ID NO: 121 - protein, 38 aa, Homo sapiens
  Table 1 sequence identifier: Q9NYL9_C132
  MOD_RES (21)..(21): May or may not be conjugated to a chemical probe
KVSLDPELEEALTSASDTELCDLAAILGMHNLITNTKF

SEQ ID NO: 122 - protein, 13 aa, Homo sapiens
  Table 1 sequence identifier: O00429_C367
  MOD_RES (3)..(3): May or may not be conjugated to a chemical probe
RICYIFHETFGRT

SEQ ID NO: 123 - protein, 11 aa, Homo sapiens
  Table 1 sequence identifier: Q13155_C23
  MOD_RES (7)..(7): May or may not be conjugated to a chemical probe
RVELPTCMYRL

SEQ ID NO: 124 - protein, 25 aa, Homo sapiens
  Table 1 sequence identifier: P30101_C57
  MOD_RES (20)..(20): May or may not be conjugated to a chemical probe
RISDTGSAGLMLVEFFAPWCGHCKR

SEQ ID NO: 125 - protein, 8 aa, Homo sapiens
  Table 1 sequence identifier: Q9ULA0_C144
  MOD_RES (2)..(2): May or may not be conjugated to a chemical probe
KCPTSGRL

SEQ ID NO: 126 - protein, 28 aa, Homo sapiens
  Table 1 sequence identifier: Q9BWD1_C92
  MOD_RES (22)..(22): May or may not be conjugated to a chemical probe
RQASVGAGIPYSVPAWSCQMICGSGLKA

SEQ ID NO: 127 - protein, 12 aa, Homo sapiens
  Table 1 sequence identifier: Q8NBS9_C350
  MOD_RES (7)..(7): May or may not be conjugated to a chemical probe
KFYAPWCGHCKT

SEQ ID NO: 128 - protein, 22 aa, Homo sapiens
  Table 1 sequence identifier: P68366_C54
  MOD_RES (15)..(15): May or may not be conjugated to a chemical probe
KTIGGGDDSFTTFFCETGAGKH

SEQ ID NO: 129 - protein, 12 aa, Homo sapiens
  Table 1 sequence identifier: P04183_C66
  MOD_RES (7)..(7): May or may not be conjugated to a chemical probe
RYSSSFCTHDRN

SEQ ID NO: 130 - protein, 20 aa, Homo sapiens
  Table 1 sequence identifier: Q15021_C439
  MOD_RES (18)..(18): May or may not be conjugated to a chemical probe
KNAIQLLASFLANNPFSCKL

SEQ ID NO: 131 - protein, 19 aa, Homo sapiens
  Table 1 sequence identifier: Q8WUM4_C250
  MOD_RES (3)..(3): May or may not be conjugated to a chemical probe
KHCIMQANAEYHQSILAKQ

SEQ ID NO: 132 - protein, 25 aa, Homo sapiens
  Table 1 sequence identifier: Q96F86_C413
  MOD_RES (17)..(17): May or may not be conjugated to a chemical probe
KDLPTSPVDLVINCLDCPENVFLRD

SEQ ID NO: 133 - protein, 15 aa, Homo sapiens
  Table 1 sequence identifier: P35754_C23
  MOD_RES (10)..(10): May or may not be conjugated to a chemical probe
KVVVFIKPTCPYCRR

SEQ ID NO: 134 - protein, 20 aa, Homo sapiens
  Table 1 sequence identifier: Q9NQ88_C114
  MOD_RES (4)..(4): May or may not be conjugated to a chemical probe
REECPVFTPPGGETLDQVKM

SEQ ID NO: 135 - protein, 29 aa, Homo sapiens
  Table 1 sequence identifier: P12268_C331
  MOD_RES (10)..(10): May or may not be conjugated to a chemical probe
RVGMGSGSICITQEVLACGRPQATAVYKV

SEQ ID NO: 136 - protein, 33 aa, Homo sapiens
  Table 1 sequence identifier: P25705_C294
  MOD_RES (25)..(25): May or may not be conjugated to a chemical probe
KYTIVVSATASDAAPLQYLAPYSGCSMGEYFRD

SEQ ID NO: 137 - protein, 22 aa, Homo sapiens
  Table 1 sequence identifier: P15374_C95
  MOD_RES (8)..(8): May or may not be conjugated to a chemical probe
KQTISNACGTIGLIHAIANNKD

SEQ ID NO: 138 - protein, 12 aa, Homo sapiens
  Table 1 sequence identifier: P83731_C6
  MOD_RES (5)..(5): May or may not be conjugated to a chemical probe
KVELCSFSGYKI

SEQ ID NO: 139 - protein, 21 aa, Homo sapiens
  Table 1 sequence identifier: Q9NX24_C18
  MOD_RES (16)..(16): May or may not be conjugated to a chemical probe
KIKADPDGPEAQAEACSGERT

SEQ ID NO: 140 - protein, 18 aa, Homo sapiens
  Table 1 sequence identifier: Q13418_C346
  MOD_RES (14)..(14): May or may not be conjugated to a chemical probe
FSFQCPGRKFSFQCPGRM

SEQ ID NO: 141 - protein, 26 aa, Homo sapiens
  Table 1 sequence identifier: Q13428_C38
  MOD_RES (2)..(2): May or may not be conjugated to a chemical probe
KCFLAQPVTLLDIYTHWQQTSELGRK

SEQ ID NO: 142 - protein, 11 aa, Homo sapiens
  Table 1 sequence identifier: P24941_C177
  MOD_RES (9)..(9): May or may not be conjugated to a chemical probe
RAPEILLGCKY

SEQ ID NO: 143 - protein, 14 aa, Homo sapiens
  Table 1 sequence identifier: P43686_C210
  MOD_RES (11)..(11): May or may not be conjugated to a chemical probe
RGVLMYGPPGCGKT

SEQ ID NO: 144 - protein, 21 aa, Homo sapiens
  Table 1 sequence identifier: Q9BTA9_C553
  MOD_RES (4)..(4): May or may not be conjugated to a chemical probe
RSTCSLTPALAAHFSENLIKH

SEQ ID NO: 145 - protein, 18 aa, Homo sapiens
  Table 1 sequence identifier: O14929_C101
  MOD_RES (8)..(8): May or may not be conjugated to a chemical probe
KVDENFDCVEADDVEGKI

SEQ ID NO: 146 - protein, 18 aa, Homo sapiens
  Table 1 sequence identifier: O75521_C380
  MOD_RES (7)..(7): May or may not be conjugated to a chemical probe
RWLSDECTNAVVNFLSRK

SEQ ID NO: 147 - protein, 14 aa, Homo sapiens
  Table 1 sequence identifier: P11586_C863
  MOD_RES (10)..(10): May or may not be conjugated to a chemical probe
KQGFGNLPICMAKT

SEQ ID NO: 148 - protein, 17 aa, Homo sapiens
  Table 1 sequence identifier: P27707_C45
  MOD_RES (4)..(4): May or may not be conjugated to a chemical probe
KQLCEDWEVVPEPVARW

SEQ ID NO: 149 - protein, 17 aa, Homo sapiens
  Table 1 sequence identifier: A0AVT1_C347
  MOD_RES (7)..(7): May or may not be conjugated to a chemical probe
RKPNVGCQQDSEELLKL

SEQ ID NO: 150 - protein, 25 aa, Homo sapiens
  Table 1 sequence identifier: Q96AB3_C114
  MOD_RES (13)..(13): May or may not be conjugated to a chemical probe
RSVLLCGIEAQACILNTTLDLLDRG

SEQ ID NO: 151 - protein, 14 aa, Homo sapiens
  Table 1 sequence identifier: Q14203_C1252
  MOD_RES (6)..(6): May or may not be conjugated to a chemical probe
KVTFSCAAGFGQRH

SEQ ID NO: 152 - protein, 21 aa, Homo sapiens
  Table 1 sequence identifier: Q9BTE3_C287
  MOD_RES (12)..(12): May or may not be conjugated to a chemical probe
RDASALLDPMECTDTAEEQRV

SEQ ID NO: 153 - protein, 18 aa, Homo sapiens
  Table 1 sequence identifier: O95373_C757
  MOD_RES (6)..(6): May or may not be conjugated to a chemical probe
RGIDQCIPLFVEAALERL

SEQ ID NO: 154 - protein, 9 aa, Homo sapiens
  Table 1 sequence identifier: P22061_C102
  MOD_RES (5)..(5): May or may not be conjugated to a chemical probe
RMVGCTGKV

SEQ ID NO: 155 - protein, 11 aa, Homo sapiens
  Table 1 sequence identifier: P55060_C842
  MOD_RES (4)..(4): May or may not be conjugated to a chemical probe
KKICAVGITKL

SEQ ID NO: 156 - protein, 12 aa, Homo sapiens
  Table 1 sequence identifier: Q9BXJ9_C322
  MOD_RES (3)..(3): May or may not be conjugated to a chemical probe
KGCPPVFNTLRS

SEQ ID NO: 157 - protein, 14 aa, Homo sapiens
  Table 1 sequence identifier: P62333_C170
  MOD_RES (3)..(3): May or may not be conjugated to a chemical probe
KGCLLYGPPGTGKT

SEQ ID NO: 158 - protein, 19 aa, Homo sapiens
  Table 1 sequence identifier: Q15398_C129
  MOD_RES (8)..(8): May or may not be conjugated to a chemical probe
RYRPDMPCFLLSNQNAVKA

SEQ ID NO: 159 - protein, 28 aa, Homo sapiens
  Table 1 sequence identifier: Q9BVC5_C10
  MOD_RES (3)..(3): May or may not be conjugated to a chemical probe
RSCTDSELLLHPELLSQEFLLLTLEQKN

SEQ ID NO: 160 - protein, 13 aa, Homo sapiens
  Table 1 sequence identifier: P62280_C116
  MOD_RES (10)..(10): May or may not be conjugated to a chemical probe
KNMSVHLSPCFRD

SEQ ID NO: 161 - protein, 34 aa, Homo sapiens
  Table 1 sequence identifier: P42224_C255
  MOD_RES (14)..(14): May or may not be conjugated to a chemical probe
RQQSACIGGPPNACLDQLQNWFTIVAESLQQVRQ

SEQ ID NO: 162 - protein, 19 aa, Homo sapiens
  Table 1 sequence identifier: Q96RN5_C618
  MOD_RES (6)..(6): May or may not be conjugated to a chemical probe
KQQYLCQPLLDAVLANIRS

SEQ ID NO: 163 - protein, 42 aa, Homo sapiens
  Table 1 sequence identifier: Q6UB35_C961
  MOD_RES (27)..(27): May or may not be conjugated to a chemical probe
RASIGAGFIYPLVGTMSTMPGLPTRPCFYDIDLDTETEQVKG

SEQ ID NO: 164 - protein, 9 aa, Homo sapiens
  Table 1 sequence identifier: P23919_C163
  MOD_RES (2)..(2): May or may not be conjugated to a chemical probe
RCFHQLMKD

SEQ ID NO: 165 - protein, 29 aa, Homo sapiens
  Table 1 sequence identifier: Q92616_C1692
  MOD_RES (7)..(7): May or may not be conjugated to a chemical probe
KGMGESCFEDLLPWLMETLTYEQSSVDRS

SEQ ID NO: 166 - protein, 12 aa, Homo sapiens
  Table 1 sequence identifier: P42166_C341
  MOD_RES (8)..(8): May or may not be conjugated to a chemical probe
KSGIQPLCPERS

SEQ ID NO: 167 - protein, 11 aa, Homo sapiens
  Table 1 sequence identifier: O95571_C170
  MOD_RES (8)..(8): May or may not be conjugated to a chemical probe
RTDFQQGCAKT

SEQ ID NO: 168 - protein, 14 aa, Homo sapiens
  Table 1 sequence identifier: O14777_C449
  MOD_RES (10)..(10): May or may not be conjugated to a chemical probe
KFNPEAGANCLVKY

SEQ ID NO: 169 - protein, 14 aa, Homo sapiens
  Table 1 sequence identifier: P36542_C103
  MOD_RES (4)..(4): May or may not be conjugated to a chemical probe
RGLCGAIHSSIAKQ

SEQ ID NO: 170 - protein, 34 aa, Homo sapiens
  Table 1 sequence identifier: Q9Y3D0_C93
  MOD_RES (22)..(22): May or may not be conjugated to a chemical probe
RVQVSDPESTVAVAFTPTIPHCSMATLIGLSIKV

SEQ ID NO: 171 - protein, 22 aa, Homo sapiens
  Table 1 sequence identifier: P54136_C34
  MOD_RES (5)..(5): May or may not be conjugated to a chemical probe
KNCGCLGASPNLEQLQEENLKL

SEQ ID NO: 172 - protein, 13 aa, Homo sapiens
  Table 1 sequence identifier: Q96T76_C819
  MOD_RES (8)..(8): May or may not be conjugated to a chemical probe
RYHPLSSCLTARL

SEQ ID NO: 173 - protein, 35 aa, Homo sapiens
  Table 1 sequence identifier: Q8TBC4_C237
  MOD_RES (27)..(27): May or may not be conjugated to a chemical probe
RVILPGMTACIECTLELYPPQVNFPMCTIASMPRL

SEQ ID NO: 174 - protein, 11 aa, Homo sapiens
  Table 1 sequence identifier: Q13573_C250
  MOD_RES (5)..(5): May or may not be conjugated to a chemical probe
KIPPCISNWKN

SEQ ID NO: 175 - protein, 18 aa, Homo sapiens
  Table 1 sequence identifier: P46734_C207
  MOD_RES (3)..(3): May or may not be conjugated to a chemical probe
KMCDFGISGYLVDSVAKT

SEQ ID NO: 176 - protein, 27 aa, Homo sapiens
  Table 1 sequence identifier: P34932_C34
  MOD_RES (16)..(16): May or may not be conjugated to a chemical probe
RAGGIETIANEYSDRCTPACISFGPKN

SEQ ID NO: 177 - protein, 25 aa, Homo sapiens
  Table 1 sequence identifier: Q9UBR2_C92
  MOD_RES (12)..(12): May or may not be conjugated to a chemical probe
RNQHIPQYCGSCWAHASTSAMADRI

SEQ ID NO: 178 - protein, 20 aa, Homo sapiens
  Table 1 sequence identifier: Q16763_C118
  MOD_RES (2)..(2): May or may not be conjugated to a chemical probe
KCLLIHPNPESALNEEAGRL

SEQ ID NO: 179 - protein, 19 aa, Homo sapiens
  Table 1 sequence identifier: Q06203_C100
  MOD_RES (2)..(2): May or may not be conjugated to a chemical probe
KCELENCQPFVVETLHGKI

SEQ ID NO: 180 - protein, 18 aa, Homo sapiens
  Table 1 sequence identifier: P51649_C340
  MOD_RES (7)..(7): May or may not be conjugated to a chemical probe
RNTGQTCVCSNQFLVQRG

SEQ ID NO: 181 - protein, 22 aa, Homo sapiens
  Table 1 sequence identifier: P43246_C822
  MOD_RES (5)..(5): May or may not be conjugated to a chemical probe
KKGVCDQSFGIHVAELANFPKH

SEQ ID NO: 182 - protein, 30 aa, Homo sapiens
  Table 1 sequence identifier: P27708_C73
  MOD_RES (28)..(28): May or may not be conjugated to a chemical probe
KAQILVLTYPLIGNYGIPPDEMDEFGLCKW

SEQ ID NO: 183 - protein, 14 aa, Homo sapiens
  Table 1 sequence identifier: Q16822_C306
  MOD_RES (11)..(11): May or may not be conjugated to a chemical probe
RYVAAAFPSACGKT

SEQ ID NO: 184 - protein, 24 aa, Homo sapiens
  Table 1 sequence identifier: Q01813_C641
  MOD_RES (5)..(5): May or may not be conjugated to a chemical probe
RNESCSENYTTDFIYQLYSEEGKG

SEQ ID NO: 185 - protein, 19 aa, Homo sapiens
  Table 1 sequence identifier: Q96CM8_C64
  MOD_RES (16)..(16): May or may not be conjugated to a chemical probe
RMVSTPIGGLSYVQGCTKK

SEQ ID NO: 186 - protein, 46 aa, Homo sapiens
  Table 1 sequence identifier: Q9BUK6_C403
  MOD_RES (38)..(38): May or may not be conjugated to a chemical probe
KVVTAGAIIPFPLAPGQSLPDSLMQFGGATPWTPLSACGEPSGTRC

SEQ ID NO: 187 - protein, 36 aa, Homo sapiens
  Table 1 sequence identifier: P22234_C374
  MOD_RES (8)..(8): May or may not be conjugated to a chemical probe
RLPSGLGCSTVLSPEGSAQFAAQIFGLSNHLVWSKL

SEQ ID NO: 188 - protein, 27 aa, Homo sapiens
  Table 1 sequence identifier: Q6ICB0_C108
  MOD_RES (12)..(12): May or may not be conjugated to a chemical probe
RGEAYNLFEHNCNTFSNEVAQFLTGRK

SEQ ID NO: 189 - protein, 14 aa, Homo sapiens
  Table 1 sequence identifier: P62333_C193
  MOD_RES (9)..(9): May or may not be conjugated to a chemical probe
RAVASQLDCNFLKV

SEQ ID NO: 190 - protein, 29 aa, Homo sapiens
  Table 1 sequence identifier: Q8IUR0_C139
  MOD_RES (8)..(8): May or may not be conjugated to a chemical probe
KENSTLNCASFTAGIVEAVLTHSGFPAKV

SEQ ID NO: 191 - protein, 34 aa, Homo sapiens
  Table 1 sequence identifier: Q01813_C179
  MOD_RES (19)..(19): May or may not be conjugated to a chemical probe
KYAYLNVVGMVGSIDNDFCGTDMTIGTDSALHRI

SEQ ID NO: 192 - protein, 9 aa, Homo sapiens
  Table 1 sequence identifier: P38606_C138
  MOD_RES (7)..(7): May or may not be conjugated to a chemical probe
KWDFTPCKN

SEQ ID NO: 193 - protein, 15 aa, Homo sapiens
  Table 1 sequence identifier: P82932_C105
  MOD_RES (3)..(3): May or may not be conjugated to a chemical probe
KECEGIVPVPLAEKL

SEQ ID NO: 194 - protein, 19 aa, Homo sapiens
  Table 1 sequence identifier: Q9NS86_C187
  MOD_RES (5)..(5): May or may not be conjugated to a chemical probe
RSVVCQESDLPDELLYGRA

SEQ ID NO: 195 - protein, 14 aa, Homo sapiens
  Table 1 sequence identifier: Q9ULV4_C456
  MOD_RES (8)..(8): May or may not be conjugated to a chemical probe
KSIKDTICNQDERI

SEQ ID NO: 196 - protein, 22 aa, Homo sapiens
  Table 1 sequence identifier: P09110_C381
  MOD_RES (17)..(17): May or may not be conjugated to a chemical probe
KVNPLGGAVALGHPLGCTGARQ

SEQ ID NO: 197 - protein, 20 aa, Homo sapiens
  Table 1 sequence identifier: Q9HAV7_C124
  MOD_RES (5)..(5): May or may not be conjugated to a chemical probe
KATQCVPKEEIKDDNPHLKN

SEQ ID NO: 198 - protein, 12 aa, Homo sapiens
  Table 1 sequence identifier: Q14738_C17
  MOD_RES (2)..(2): May or may not be conjugated to a chemical probe
KCTAKPSSSGKD

SEQ ID NO: 199 - protein, 23 aa, Homo sapiens
  Table 1 sequence identifier: Q99757_C90
  MOD_RES (18)..(18): May or may not be conjugated to a chemical probe
RVVNSETPVVVDFHAQWCGPCKI

SEQ ID NO: 200 - protein, 31 aa, Homo sapiens
  Table 1 sequence identifier: P51570_C182
  MOD_RES (17)..(17): May or may not be conjugated to a chemical probe
RAQVCQQAEHSFAGMPCGIMDQFISLMGQKG

SEQ ID NO: 201 - protein, 13 aa, Homo sapiens
  Table 1 sequence identifier: Q06330_C313
  MOD_RES (10)..(10): May or may not be conjugated to a chemical probe
RIIQFQATPCPKE

SEQ ID NO: 202 - protein, 14 aa, Homo sapiens
  Table 1 sequence identifier: Q9NVC6_C649
  MOD_RES (12)..(12): May or may not be conjugated to a chemical probe
KMELLMSALSPCLL

SEQ ID NO: 203 - protein, 24 aa, Homo sapiens
  Table 1 sequence identifier: Q99832_C511
  MOD_RES (13)..(13): May or may not be conjugated to a chemical probe
RINALTAASEAACLIVSVDETIKN

SEQ ID NO: 204 - protein, 20 aa, Homo sapiens
  Table 1 sequence identifier: Q9BTE3_C325
  MOD_RES (12)..(12): May or may not be conjugated to a chemical probe
KLQHINPLLPACLNKEESKT

SEQ ID NO: 205 - protein, 16 aa, Homo sapiens
  Table 1 sequence identifier: P04183_C230
  MOD_RES (12)..(12): May or may not be conjugated to a chemical probe
RKLFAPQQILQCSPAN

SEQ ID NO: 206 - protein, 23 aa, Homo sapiens
  Table 1 sequence identifier: Q96S55_C272
  MOD_RES (20)..(20): May or may not be conjugated to a chemical probe
RSLLETNEIPSLILWGPPGCGKT

SEQ ID NO: 207 - protein, 45 aa, Homo sapiens
  Table 1 sequence identifier: Q0VGL1_C51
  MOD_RES (41)..(41): May or may not be conjugated to a chemical probe
RIPDQLGYLVLSEGAVLASSGDLENDEQAASAISELVSTACGFRL

SEQ ID NO: 208 - protein, 17 aa, Homo sapiens
  Table 1 sequence identifier: Q86W42_C35
  MOD_RES (14)..(14): May or may not be conjugated to a chemical probe
RLHMTIFSQSVSPCGKF

SEQ ID NO: 209 - protein, 12 aa, Homo sapiens
  Table 1 sequence identifier: O14980_C528
  MOD_RES (7)..(7): May or may not be conjugated to a chemical probe
KDLLGLCEQKRG

SEQ ID NO: 210 - protein, 9 aa, Homo sapiens
  Table 1 sequence identifier: P43246_C843
  MOD_RES (6)..(6): May or may not be conjugated to a chemical probe
KHVIECAKQ

SEQ ID NO: 211 - protein, 9 aa, Homo sapiens
  Table 1 sequence identifier: Q00839_C562
  MOD_RES (5)..(5): May or may not be conjugated to a chemical probe
RAPQCLGKF

SEQ ID NO: 212 - protein, 20 aa, Homo sapiens
  Table 1 sequence identifier: Q8WW01_C13
  MOD_RES (10)..(10): May or may not be conjugated to a chemical probe
RGDSEPTPGCSGLGPGGVRG

SEQ ID NO: 213 - protein, 18 aa, Homo sapiens
  Table 1 sequence identifier: O60610_C1227
  MOD_RES (5)..(5): May or may not be conjugated to a chemical probe
RKAGCAVTSLLASELTKD

SEQ ID NO: 214 - protein, 24 aa, Homo sapiens
  Table 1 sequence identifier: Q9NVM9_C349
  MOD_RES (14)..(14): May or may not be conjugated to a chemical probe
RISPVDVNSRPSSCLTNFLLNGRS

SEQ ID NO: 215 - protein, 13 aa, Homo sapiens
  Table 1 sequence identifier: O15067_C270
  MOD_RES (3)..(3): May or may not be conjugated to a chemical probe
KFCDNSSAIQGKE

SEQ ID NO: 216 - protein, 26 aa, Homo sapiens
  Table 1 sequence identifier: P38606_C254
  MOD_RES (23)..(23): May or may not be conjugated to a chemical probe
RVLDALFPCVQGGTTAIPGAFGCGKT

SEQ ID NO: 217 - protein, 12 aa, Homo sapiens
  Table 1 sequence identifier: Q8NBS9_C217
  MOD_RES (7)..(7): May or may not be conjugated to a chemical probe
KFFAPWCGHCKA

SEQ ID NO: 218 - protein, 26 aa, Homo sapiens
  Table 1 sequence identifier: P35611_C68
  MOD_RES (12)..(12): May or may not be conjugated to a chemical probe
RVSMILQSPAFCEELESMIQEQFKKG

SEQ ID NO: 219 - protein, 14 aa, Homo sapiens
  Table 1 sequence identifier: P42224_C492
  MOD_RES (11)..(11): May or may not be conjugated to a chemical probe
RNLSFFLTPPCARW

SEQ ID NO: 220 - protein, 16 aa, Homo sapiens
  Table 1 sequence identifier: P46940_C781
  MOD_RES (9)..(9): May or may not be conjugated to a chemical probe
KKQIPAITCIQSQWRG

SEQ ID NO: 221 - protein, 27 aa, Homo sapiens
  Table 1 sequence identifier: O95229_C54
  MOD_RES (6)..(6): May or may not be conjugated to a chemical probe
KDKLLCSQLQVADFLQNILAQEDTAKG

SEQ ID NO: 222 - protein, 12 aa, Homo sapiens
  Table 1 sequence identifier: Q969Q0_C88
  MOD_RES (2)..(2): May or may not be conjugated to a chemical probe
RCKHFELGGDKK

SEQ ID NO: 223 - protein, 23 aa, Homo sapiens
  Table 1 sequence identifier: Q29RF7_C242
  MOD_RES (9)..(9): May or may not be conjugated to a chemical probe
RTVQTIEACIANFFNQVLVLGRS

SEQ ID NO: 224 - protein, 24 aa, Homo sapiens
  Table 1 sequence identifier: Q2NL82_C126
  MOD_RES (21)..(21): May or may not be conjugated to a chemical probe
RDTGTVHLNELGNTQNFMLLCPRL

SEQ ID NO: 225 - protein, 11 aa, Homo sapiens
  Table 1 sequence identifier: Q9UKX7_C151
  MOD_RES (3)..(3): May or may not be conjugated to a chemical probe
KACVGNAYHKQ

SEQ ID NO: 226 - protein, 20 aa, Homo sapiens
  Table 1 sequence identifier: P18621_C144
  MOD_RES (10)..(10): May or may not be conjugated to a chemical probe
RINPYMSSPCHIEMILTEKE

SEQ ID NO: 227 - protein, 21 aa, Homo sapiens
  Table 1 sequence identifier: P49189_C288
  MOD_RES (15)..(15): May or may not be conjugated to a chemical probe
KGALMANFLTQGQVCCNGTRV

SEQ ID NO: 228 - protein, 18 aa, Homo sapiens
  Table 1 sequence identifier: P45985_C246
  MOD_RES (3)..(3): May or may not be conjugated to a chemical probe
KLCDFGISGQLVDSIAKT

SEQ ID NO: 229 - protein, 41 aa, Homo sapiens
  Table 1 sequence identifier: Q13428_C1298
  MOD_RES (21)..(21): May or may not be conjugated to a chemical probe
KKGAGNPQASTLALQSNITQCLLGQPWPLNEAQVQASVVKV

SEQ ID NO: 230 - protein, 21 aa, Homo sapiens
  Table 1 sequence identifier: Q9BRF8_C54
  MOD_RES (8)..(8): May or may not be conjugated to a chemical probe
KAWSTGDCDNGGDEWEQEIRL

SEQ ID NO: 231 - protein, 11 aa, Homo sapiens
  Table 1 sequence identifier: O00170_C122
  MOD_RES (4)..(4): May or may not be conjugated to a chemical probe
RHCCGVAQMRE

SEQ ID NO: 232 - protein, 33 aa, Homo sapiens
  Table 1 sequence identifier: Q9UNI6_C265
  MOD_RES (5)..(5): May or may not be conjugated to a chemical probe
RQAQCTSYFIEPVQWMESALLGVMDGQLLCPKC

SEQ ID NO: 233 - protein, 18 aa, Homo sapiens
  Table 1 sequence identifier: P52657_C68
  MOD_RES (3)..(3): May or may not be conjugated to a chemical probe
RFCDNVWTFVLNDVEFRE

SEQ ID NO: 234 - protein, 40 aa, Homo sapiens
  Table 1 sequence identifier: O15067_C1287
  MOD_RES (36)..(36): May or may not be conjugated to a chemical probe
RGLAPLHWADDDGNPTEQYPLNPNGSPGGVAGICSCDGRH

SEQ ID NO: 235 - protein, 13 aa, Homo sapiens
  Table 1 sequence identifier: P37235_C185
  MOD_RES (5)..(5): May or may not be conjugated to a chemical probe
RLLQCDPSSASQF

SEQ ID NO: 236 - protein, 14 aa, Homo sapiens
  Table 1 sequence identifier: P53602_C108
  MOD_RES (12)..(12): May or may not be conjugated to a chemical probe
RDGDPLPSSLSCKV

SEQ ID NO: 237 - protein, 19 aa, Homo sapiens
  Table 1 sequence identifier: Q96C19_C172
  MOD_RES (14)..(14): May or may not be conjugated to a chemical probe
KAAAGELQEDSGLCVLARL

SEQ ID NO: 238 - protein, 16 aa, Homo sapiens
  Table 1 sequence identifier: Q9NQC3_C1101
  MOD_RES (12)..(12): May or may not be conjugated to a chemical probe
KYSNSALGHVNCTIKE

SEQ ID NO: 239 - protein, 18 aa, Homo sapiens
  Table 1 sequence identifier: O43175_C369
  MOD_RES (6)..(6): May or may not be conjugated to a chemical probe
KNAGNCLSPAVIVGLLKE

SEQ ID NO: 240 - protein, 10 aa, Homo sapiens
  Table 1 sequence identifier: Q99638_C114
  MOD_RES (8)..(8): May or may not be conjugated to a chemical probe
RLVVQLHCKF

SEQ ID NO: 241 - protein, 26 aa, Homo sapiens
  Table 1 sequence identifier: Q06830_C83
  MOD_RES (16)..(16): May or may not be conjugated to a chemical probe
KLNCQVIGASVDSHFCHLAWVNTPKK

SEQ ID NO: 242 - protein, 20 aa, Homo sapiens
  Table 1 sequence identifier: Q00796_C45
  MOD_RES (8)..(8): May or may not be conjugated to a chemical probe
RMHSVGICGSDVHYWEYGRI

SEQ ID NO: 243 - protein, 17 aa, Homo sapiens
  Table 1 sequence identifier: Q9NRG0_C55
  MOD_RES (9)..(9): May or may not be conjugated to a chemical probe
KATELFVQCLATYSYRH

SEQ ID NO: 244 - protein, 34 aa, Homo sapiens
  Table 1 sequence identifier: P31949_C91
  MOD_RES (27)..(27): May or may not be conjugated to a chemical probe
KKLDTNSDGQLDFSEFLNLIGGLAMACHDSFLKA

SEQ ID NO: 245 - protein, 15 aa, Homo sapiens
  Table 1 sequence identifier: Q9NY65_C347
  MOD_RES (9)..(9): May or may not be conjugated to a chemical probe
RTIQFVDWCPTGFKV

SEQ ID NO: 246 - protein, 12 aa, Homo sapiens
  Table 1 sequence identifier: Q9NXV6_C516
  MOD_RES (9)..(9): May or may not be conjugated to a chemical probe
KSVYLGTGCGKS

SEQ ID NO: 247 - protein, 23 aa, Homo sapiens
  Table 1 sequence identifier: Q13162_C51
  MOD_RES (7)..(7): May or may not be conjugated to a chemical probe
RTREEECHFYAGGQVYPGEASRV

SEQ ID NO: 248 - protein, 23 aa, Homo sapiens
  Table 1 sequence identifier: Q14997_C1840
  MOD_RES (20)..(20): May or may not be conjugated to a chemical probe
KQQFTDDQLLVLTDLLVSPCYYA

SEQ ID NO: 249 - protein, 21 aa, Homo sapiens
  Table 1 sequence identifier: Q15003_C418
  MOD_RES (4)..(4): May or may not be conjugated to a chemical probe
RTMCPLLSMKPGEYSYFSPRT

SEQ ID NO: 250 - protein, 12 aa, Homo sapiens
  Table 1 sequence identifier: Q01433_C107
  MOD_RES (9)..(9): May or may not be conjugated to a chemical probe
RSLPGPAPCLKH

SEQ ID NO: 251 - protein, 12 aa, Homo sapiens
  Table 1 sequence identifier: O75874_C269
  MOD_RES (10)..(10): May or may not be conjugated to a chemical probe
KSEGGFIWACKN

SEQ ID NO: 252 - protein, 23 aa, Homo sapiens
  Table 1 sequence identifier: Q29RF7_C532
  MOD_RES (16)..(16): May or may not be conjugated to a chemical probe
RELLDLHKQPTSEANCSAMFGKL

SEQ ID NO: 253 - protein, 18 aa, Homo sapiens
  Table 1 sequence identifier: P11498_C622
  MOD_RES (14)..(14): May or may not be conjugated to a chemical probe
FLYECPWRRFLYECPWRR

SEQ ID NO: 254 - protein, 29 aa, Homo sapiens
  Table 1 sequence identifier: P49411_C147
  MOD_RES (13)..(13): May or may not be conjugated to a chemical probe
KNMITGTAPLDGCILVVAANDGPMPQTRE

SEQ ID NO: 255 - protein, 12 aa, Homo sapiens
  Table 1 sequence identifier: Q9H0C8_C301
  MOD_RES (2)..(2): May or may not be conjugated to a chemical probe
RCGVTSVPDIRR

SEQ ID NO: 256 - protein, 16 aa, Homo sapiens
  Table 1 sequence identifier: Q02252_C317
  MOD_RES (2)..(2): May or may not be conjugated to a chemical probe
RCMALSTAVLVGEAKK

SEQ ID NO: 257 - protein, 18 aa, Homo sapiens
  Table 1 sequence identifier: O00487_C238
  MOD_RES (16)..(16): May or may not be conjugated to a chemical probe
KSWMEGLTLQDYSEHCKH

SEQ ID NO: 258 - protein, 11 aa, Homo sapiens
  Table 1 sequence identifier: P23919_C117
  MOD_RES (9)..(9): May or may not be conjugated to a chemical probe
KENFSLDWCKQ

SEQ ID NO: 259 - protein, 21 aa, Homo sapiens
  Table 1 sequence identifier: O75362_C286
  MOD_RES (2)..(2): May or may not be conjugated to a chemical probe
RCIPQLDPFTTFQAWQLATKG

SEQ ID NO: 260 - protein, 10 aa, Homo sapiens
  Table 1 sequence identifier: P10644_C18
  MOD_RES (3)..(3): May or may not be conjugated to a chemical probe
RECELYVQKH

SEQ ID NO: 261 - protein, 11 aa, Homo sapiens
  Table 1 sequence identifier: P51610_C1872
  MOD_RES (8)..(8): May or may not be conjugated to a chemical probe
RVAGINACGRG

SEQ ID NO: 262 - protein, 14 aa, Homo sapiens
  Table 1 sequence identifier: P0CB43_C51
  MOD_RES (9)..(9): May or may not be conjugated to a chemical probe
RHVLALTGCGPGRA

SEQ ID NO: 263 - protein, 24 aa, Homo sapiens
  Table 1 sequence identifier: O60825_C158
  MOD_RES (9)..(9): May or may not be conjugated to a chemical probe
KVFFVESVCDDPDVIAANILEVKV

SEQ ID NO: 264 - protein, 12 aa, Homo sapiens
  Table 1 sequence identifier: Q15813_C141
  MOD_RES (7)..(7): May or may not be conjugated to a chemical probe
RNCAVSCAGEKG

SEQ ID NO: 265 - protein, 18 aa, Homo sapiens
  Table 1 sequence identifier: P30044_C100
  MOD_RES (15)..(15): May or may not be conjugated to a chemical probe
KGVLFGVPGAFTPGCSKT

SEQ ID NO: 266 - protein, 22 aa, Homo sapiens
  Table 1 sequence identifier: Q8N1F7_C522
  MOD_RES (19)..(19): May or may not be conjugated to a chemical probe
KSSGQSAQLLSHEPGDPPCLRR

SEQ ID NO: 267 - protein, 24 aa, Homo sapiens
  Table 1 sequence identifier: Q9P0J1_C149
  MOD_RES (14)..(14): May or may not be conjugated to a chemical probe
RGMLLGVFDGHAGCACSQAVSERL

SEQ ID NO: 268 - protein, 19 aa, Homo sapiens
  Table 1 sequence identifier: P07858_C319
  MOD_RES (6)..(6): May or may not be conjugated to a chemical probe
RGQDHCGIESEVVAGIPRT

SEQ ID NO: 269 - protein, 19 aa, Homo sapiens
  Table 1 sequence identifier: P12814_C370
  MOD_RES (12)..(12): May or may not be conjugated to a chemical probe
RMVSDINNAWGCLEQVEKG

SEQ ID NO: 270 - protein, 21 aa, Homo sapiens
  Table 1 sequence identifier: O15294_C620
  MOD_RES (17)..(17): May or may not be conjugated to a chemical probe
KVMAEANHFIDLSQIPCNGKA

SEQ ID NO: 271 - protein, 19 aa, Homo sapiens
  Table 1 sequence identifier: Q86WS5_C64
  MOD_RES (12)..(12): May or may not be conjugated to a chemical probe
RRREGGAHAEDCGTAPLKD

SEQ ID NO: 272 - protein, 13 aa, Homo sapiens
  Table 1 sequence identifier: Q9NQW6_C712
  MOD_RES (7)..(7): May or may not be conjugated to a chemical probe
KNNAFPCQVNIKQ

SEQ ID NO: 273 - protein, 17 aa, Homo sapiens
  Table 1 sequence identifier: Q9NY27_C22
  MOD_RES (4)..(4): May or may not be conjugated to a chemical probe
KEVCPVLDQFLCHVAKT

SEQ ID NO: 274 - protein, 34 aa, Homo sapiens
  Table 1 sequence identifier: P40763_C259
  MOD_RES (14)..(14): May or may not be conjugated to a chemical probe
RQQIACIGGPPNICLDRLENWITSLAESQLQTRQ

SEQ ID NO: 275 - protein, 33 aa, Homo sapiens
  Table 1 sequence identifier: O60701_C276
  MOD_RES (10)..(10): May or may not be conjugated to a chemical probe
KASVGFGGSCFQKDVLNLVYLCEALNLPEVARY

SEQ ID NO: 276 - protein, 23 aa, Homo sapiens
  Table 1 sequence identifier: Q09666_C108
  MOD_RES (7)..(7): May or may not be conjugated to a chemical probe
REVFSSCSSEVVLSGDDEEYQRI

SEQ ID NO: 277 - protein, 11 aa, Homo sapiens
  Table 1 sequence identifier: P49773_C84
  MOD_RES (2)..(2): May or may not be conjugated to a chemical probe
KCAADLGLNKG

SEQ ID NO: 278 - protein, 29 aa, Homo sapiens
  Table 1 sequence identifier: O95071_C2314
  MOD_RES (22)..(22): May or may not be conjugated to a chemical probe
RSFYTAIAQAFLSNEKLPNLECIQNANKG

SEQ ID NO: 279 - protein, 13 aa, Homo sapiens
  Table 1 sequence identifier: Q9Y3Z3_C522
  MOD_RES (11)..(11): May or may not be conjugated to a chemical probe
KNPIDHVSFYCKT

SEQ ID NO: 280 - protein, 9 aa, Homo sapiens
  Table 1 sequence identifier: O75717_C773
  MOD_RES (7)..(7): May or may not be conjugated to a chemical probe
KMLALSCKL

SEQ ID NO: 281 - protein, 23 aa, Homo sapiens
  Table 1 sequence identifier: Q9NPF4_C265
  MOD_RES (19)..(19): May or may not be conjugated to a chemical probe
RAMAHCGSQEALIVGGVGCNVRL

SEQ ID NO: 282 - protein, 20 aa, Homo sapiens
  Table 1 sequence identifier: P16455_C150
  MOD_RES (4)..(4): May or may not be conjugated to a chemical probe
RVVCSSGAVGNYSGGLAVKE

SEQ ID NO: 283 - protein, 24 aa, Homo sapiens
  Table 1 sequence identifier: P49327_C1558
  MOD_RES (7)..(7): May or may not be conjugated to a chemical probe
RHAQPTCPGAQLCTVYYASLNFRD

SEQ ID NO: 284 - protein, 11 aa, Homo sapiens
  Table 1 sequence identifier: Q96GG9_C115
  MOD_RES (6)..(6): May or may not be conjugated to a chemical probe
RAATQCEFSKQ

SEQ ID NO: 285 - protein, 33 aa, Homo sapiens
  Table 1 sequence identifier: P13797_C33
  MOD_RES (23)..(23): May or may not be conjugated to a chemical probe
KDELDELKEAFAKVDLNSNGFICDYELHELFKE

SEQ ID NO: 286 - protein, 26 aa, Homo sapiens
  Table 1 sequence identifier: P37198_C475
  MOD_RES (24)..(24): May or may not be conjugated to a chemical probe
KDIIEHLNTSGAPADTSDPLQQICKI

SEQ ID NO: 287 - protein, 14 aa, Homo sapiens
  Table 1 sequence identifier: P00813_C75
  MOD_RES (12)..(12): May or may not be conjugated to a chemical probe
KFDYYMPAIAGCRE

SEQ ID NO: 288 - protein, 25 aa, Homo sapiens
  Table 1 sequence identifier: O75153_C333
  MOD_RES (22)..(22): May or may not be conjugated to a chemical probe
RIATPFQVYSWTAPQAEHAMDCVRA

SEQ ID NO: 289 - protein, 20 aa, Homo sapiens
  Table 1 sequence identifier: A6NDU8_C179
  MOD_RES (2)..(2): May or may not be conjugated to a chemical probe
RCPIQLNEGVSFQDLDTAKL

SEQ ID NO: 290 - protein, 34 aa, Homo sapiens
  Table 1 sequence identifier: Q9BWU1_C349
  MOD_RES (27)..(27): May or may not be conjugated to a chemical probe
RITSEQALQDPYFQEDPLPTLDVFAGCQIPYPKR

SEQ ID NO: 291 - protein, 13 aa, Homo sapiens
  Table 1 sequence identifier: Q15208_C234
  MOD_RES (8)..(8): May or may not be conjugated to a chemical probe
KLSDFGLCTGLKK

SEQ ID NO: 292 - protein, 20 aa, Homo sapiens
  Table 1 sequence identifier: Q9UKV3_C1223
  MOD_RES (5)..(5): May or may not be conjugated to a chemical probe
KAAPCIYWLPLTDSQIVQKE

SEQ ID NO: 293 - protein, 17 aa, Homo sapiens
  Table 1 sequence identifier: P45984_C177
  MOD_RES (4)..(4): May or may not be conjugated to a chemical probe
RTACTNFMMTPYVVTRY

SEQ ID NO: 294 - protein, 14 aa, Homo sapiens
  Table 1 sequence identifier: Q14204_C1999
  MOD_RES (8)..(8): May or may not be conjugated to a chemical probe
KTSAPITCELLNKQ

SEQ ID NO: 295 - protein, 14 aa, Homo sapiens
  Table 1 sequence identifier: P29590_C389
  MOD_RES (8)..(8): May or may not be conjugated to a chemical probe
RLQDLSSCITQGKD

SEQ ID NO: 296 - protein, 20 aa, Homo sapiens
  Table 1 sequence identifier: P62333_C228
  MOD_RES (6)..(6): May or may not be conjugated to a chemical probe
RDHQPCIIFMDEIDAIGGRR

SEQ ID NO: 297 - protein, 28 aa, Homo sapiens
  Table 1 sequence identifier: P13796_C101
  MOD_RES (5)..(5): May or may not be conjugated to a chemical probe
KEGICAIGGTSEQSSVGTQHSYSEEEKY

SEQ ID NO: 298 - protein, 24 aa, Homo sapiens
  Table 1 sequence identifier: Q9NWV8_C222
  MOD_RES (11)..(11): May or may not be conjugated to a chemical probe
RTILVYSRPPCQPQFSLTEPMKKM

SEQ ID NO: 299 - protein, 28 aa, Homo sapiens
  Table 1 sequence identifier: O14879_C343
  MOD_RES (20)..(20): May or may not be conjugated to a chemical probe
KGLNPLNAYSDLAEFLETECYQTPFNKE

SEQ ID NO: 300 - protein, 13 aa, Homo sapiens
  Table 1 sequence identifier: P50749_C251
  MOD_RES (7)..(7): May or may not be conjugated to a chemical probe
RILQGPCEQISKV

SEQ ID NO: 301 - protein, 9 aa, Homo sapiens
  Table 1 sequence identifier: O43396_C34
  MOD_RES (3)..(3): May or may not be conjugated to a chemical probe
RGCGPCLRI

SEQ ID NO: 302 - protein, 14 aa, Homo sapiens
  Table 1 sequence identifier: P35658_C728
  MOD_RES (3)..(3): May or may not be conjugated to a chemical probe
KACFQVGTSEEMKM

SEQ ID NO: 303 - protein, 13 aa, Homo sapiens
  Table 1 sequence identifier: P42166_C684
  MOD_RES (11)..(11): May or may not be conjugated to a chemical probe
KGGTLFGGEVCKV

SEQ ID NO: 304 - protein, 15 aa, Homo sapiens
  Table 1 sequence identifier: Q96FX7_C209
  MOD_RES (8)..(8): May or may not be conjugated to a chemical probe
RFCSFSPCIEQVQRT

SEQ ID NO: 305 - protein, 50 aa, Homo sapiens
  Table 1 sequence identifier: Q71U36_C200
  MOD_RES (35)..(35): May or may not be conjugated to a chemical probe
KLEFSIYPAPQVSTAVVEPYNSILTTHTTLEHSDCAFMVDNEAIYDICRR

SEQ ID NO: 306 - protein, 14 aa, Homo sapiens
  Table 1 sequence identifier: O75822_C207
  MOD_RES (10)..(10): May or may not be conjugated to a chemical probe
KITNSLTVLCSEKQ

SEQ ID NO: 307 - protein, 45 aa, Homo sapiens
  Table 1 sequence identifier: Q9UBQ7_C216
  MOD_RES (32)..(32): May or may not be conjugated to a chemical probe
RQPRPEEAAEFQAEFVSTPELAAQSDFIVVACSLTPATEGLCNKD

SEQ ID NO: 308 - protein, 16 aa, Homo sapiens
  Table 1 sequence identifier: P51946_C244
  MOD_RES (6)..(6): May or may not be conjugated to a chemical probe
KENRTCLSQLLDIMKS

SEQ ID NO: 309 - protein, 37 aa, Homo sapiens
  Table 1 sequence identifier: P05091_C319
  MOD_RES (31)..(31): May or may not be conjugated to a chemical probe
KSPNIIMSDADMDWAVEQAHFALFFNQGQCCCAGSRT

SEQ ID NO: 310 - protein, 13 aa, Homo sapiens
  Table 1 sequence identifier: Q9NZL4_C204
  MOD_RES (8)..(8): May or may not be conjugated to a chemical probe
RLLDRDACDTVRV

SEQ ID NO: 311 - protein, 13 aa, Homo sapiens
  Table 1 sequence identifier: O75439_C265
  MOD_RES (9)..(9): May or may not be conjugated to a chemical probe
KFHFGDSLCTHKG

SEQ ID NO: 312 - protein, 11 aa, Homo sapiens
  Table 1 sequence identifier: Q16527_C33
  MOD_RES (2)..(2): May or may not be conjugated to a chemical probe
RCCFLCMVCRK

SEQ ID NO: 313 - protein, 11 aa, Homo sapiens
  Table 1 sequence identifier: Q8TC07_C197
  MOD_RES (7)..(7): May or may not be conjugated to a chemical probe
RTLLVNCQNKS

SEQ ID NO: 314 - protein, 13 aa, Homo sapiens
  Table 1 sequence identifier: P07858_C211
  MOD_RES (3)..(3): May or may not be conjugated to a chemical probe
KICEPGYSPTYKQ

SEQ ID NO: 315 - protein, 11 aa, Homo sapiens
  Table 1 sequence identifier: Q15149_C3110
  MOD_RES (5)..(5): May or may not be conjugated to a chemical probe
KGRLCFEGLRS

SEQ ID NO: 316 - protein, 13 aa, Homo sapiens
  Table 1 sequence identifier: Q9NUP9_C47
  MOD_RES (8)..(8): May or may not be conjugated to a chemical probe
RVLQSEFCNAVRE

SEQ ID NO: 317 - protein, 36 aa, Homo sapiens
  Table 1 sequence identifier: Q14683_C987
  MOD_RES (13)..(13): May or may not be conjugated to a chemical probe
REALIEIDYGDLCEDLKDAQAEEEIKQEMNTLQQKL

SEQ ID NO: 318 - protein, 20 aa, Homo sapiens
  Table 1 sequence identifier: P09110_C177
  MOD_RES (5)..(5): May or may not be conjugated to a chemical probe
KARDCLIPMGITSENVAERF

SEQ ID NO: 319 - protein, 19 aa, Homo sapiens
  Table 1 sequence identifier: A9UHW6_C49
  MOD_RES (14)..(14): May or may not be conjugated to a chemical probe
KVANVIVDHSLQDCVFSKE

SEQ ID NO: 320 - protein, 35 aa, Homo sapiens
  Table 1 sequence identifier: Q9NPH0_C267
  MOD_RES (30)..(30): May or may not be conjugated to a chemical probe
RMGIDSSDKVDFFILLDNVAAEQAHNLPSCPMLKR

SEQ ID NO: 321 - protein, 12 aa, Homo sapiens
  Table 1 sequence identifier: Q92878_C1302
  MOD_RES (2)..(2): May or may not be conjugated to a chemical probe
KCSVSSLGFNVH

SEQ ID NO: 322 - protein, 29 aa, Homo sapiens
  Table 1 sequence identifier: O14933_C98
  MOD_RES (26)..(26): May or may not be conjugated to a chemical probe
KIYHPNVDENGQICLPIISSENWKPCTKT

SEQ ID NO: 323 - protein, 13 aa, Homo sapiens
  Table 1 sequence identifier: P39023_C253
  MOD_RES (4)..(4): May or may not be conjugated to a chemical probe
KVACIGAWHPARV

SEQ ID NO: 324 - protein, 20 aa, Homo sapiens
  Table 1 sequence identifier: Q9UHD8_C531
  MOD_RES (13)..(13): May or may not be conjugated to a chemical probe
KWGTIEVENTTHCEFAYLRD

SEQ ID NO: 325 - protein, 20 aa, Homo sapiens
  Table 1 sequence identifier: P42167_C363
  MOD_RES (18)..(18): May or may not be conjugated to a chemical probe
KEMFPYEASTPTGISASCRR

SEQ ID NO: 326 - protein, 16 aa, Homo sapiens
  Table 1 sequence identifier: Q14790_C360
  MOD_RES (8)..(8): May or may not be conjugated to a chemical probe
KVFFIQACQGDNYQKG

SEQ ID NO: 327 - protein, 8 aa, Homo sapiens
  Table 1 sequence identifier: Q15149_C4574
  MOD_RES (5)..(5): May or may not be conjugated to a chemical probe
KYLTCPKT

SEQ ID NO: 328 - protein, 23 aa, Homo sapiens
  Table 1 sequence identifier: Q9UJY4_C429
  MOD_RES (14)..(14): May or may not be conjugated to a chemical probe
RNLLDLLSAQPAPCPLNYVSQKS

SEQ ID NO: 329 - protein, 24 aa, Homo sapiens
  Table 1 sequence identifier: Q15306_C194
  MOD_RES (16)..(16): May or may not be conjugated to a chemical probe
RDYVPDQPHPEIPYQCPMTFGPRG

SEQ ID NO: 330 - protein, 29 aa, Homo sapiens
  Table 1 sequence identifier: Q6L8Q7_C108
  MOD_RES (12)..(12): May or may not be conjugated to a chemical probe
KSRPNASGGAACSGPGPEPAVFCEPVVKL

SEQ ID NO: 331 - protein, 26 aa, Homo sapiens
  Table 1 sequence identifier: Q8TDP1_C34
  MOD_RES (13)..(13): May or may not be conjugated to a chemical probe
RDAVPATLHLLPCEVAVDGPAPVGRF

SEQ ID NO: 332 - protein, 17 aa, Homo sapiens
  Table 1 sequence identifier: Q13045_C46
  MOD_RES (5)..(5): May or may not be conjugated to a chemical probe
RTGLCYLPEELAALQKL

SEQ ID NO: 333 - protein, 9 aa, Homo sapiens
  Table 1 sequence identifier: O95881_C66
  MOD_RES (4)..(4): May or may not be conjugated to a chemical probe
KSWCGACKA

SEQ ID NO: 334 - protein, 11 aa, Homo sapiens
  Table 1 sequence identifier: Q9Y296_C195
  MOD_RES (2)..(2): May or may not be conjugated to a chemical probe
RCELFDQNLKL

SEQ ID NO: 335 - protein, 11 aa, Homo sapiens
  Table 1 sequence identifier: Q00765_C18
  MOD_RES (3)..(3): May or may not be conjugated to a chemical probe
KNCMTDLLAKL

SEQ ID NO: 336 - protein, 38 aa, Homo sapiens
  Table 1 sequence identifier: Q86X76_C165
  MOD_RES (5)..(5): May or may not be conjugated to a chemical probe
KTHLCDVEIPGQGPMCESNSTMPGPSLESPVSTPAGKI

SEQ ID NO: 337 - protein, 10 aa, Homo sapiens
  Table 1 sequence identifier: P52597_C122
  MOD_RES (7)..(7): May or may not be conjugated to a chemical probe
RGLPFGCTKE

SEQ ID NO: 338 - protein, 23 aa, Homo sapiens
  Table 1 sequence identifier: Q96HE7_C37
  MOD_RES (4)..(4): May or may not be conjugated to a chemical probe
RCFCQVSGYLDDCTCDVETIDRF

SEQ ID NO: 339 - protein, 14 aa, Homo sapiens
  Table 1 sequence identifier: Q9BUH6_C180
  MOD_RES (2)..(2): May or may not be conjugated to a chemical probe
RCPGESLINPGFKS

SEQ ID NO: 340 - protein, 35 aa, Homo sapiens
  Table 1 sequence identifier: Q13158_C98
  MOD_RES (22)..(22): May or may not be conjugated to a chemical probe
RRVDDFEAGAAAGAAPGEEDLCAAFNVICDNVGKD

SEQ ID NO: 341 - protein, 10 aa, Homo sapiens
  Table 1 sequence identifier: Q9UBE0_C214
  MOD_RES (6)..(6): May or may not be conjugated to a chemical probe
KKVVFCPVKE

SEQ ID NO: 342 - protein, 12 aa, Homo sapiens
  Table 1 sequence identifier: Q9P2J5_C554
  MOD_RES (7)..(7): May or may not be conjugated to a chemical probe
KNLETFCEETRR

SEQ ID NO: 343 - protein, 19 aa, Homo sapiens
  Table 1 sequence identifier: Q96PU8_C35
  MOD_RES (10)..(10): May or may not be conjugated to a chemical probe
KLMSSLPNFCGIFNHLERL

SEQ ID NO: 344 - protein, 16 aa, Homo sapiens
  Table 1 sequence identifier: Q6XZF7_C691
  MOD_RES (9)..(9): May or may not be conjugated to a chemical probe
RSLDQTSPCPLVLVRI

SEQ ID NO: 345 - protein, 24 aa, Homo sapiens
  Table 1 sequence identifier: Q9Y4R8_C628
  MOD_RES (20)..(20): May or may not be conjugated to a chemical probe
RMDILDVLTLAAQELSRPGCLGRT

SEQ ID NO: 346 - protein, 14 aa, Homo sapiens
  Table 1 sequence identifier: Q9HBM1_C27
  MOD_RES (7)..(7): May or may not be conjugated to a chemical probe
KSTDTSCQMAGLRD

SEQ ID NO: 347 - protein, 18 aa, Homo sapiens
  Table 1 sequence identifier: P21980_C277
  MOD_RES (5)..(5): May or may not be conjugated to a chemical probe
KYGQCWVFAAVACTVLRC

SEQ ID NO: 348 - protein, 20 aa, Homo sapiens
  Table 1 sequence identifier: Q9H3U1_C426
  MOD_RES (14)..(14): May or may not be conjugated to a chemical probe
RAIQTVSCLLQGPCDAGNRA

SEQ ID NO: 349 - protein, 16 aa, Homo sapiens
  Table 1 sequence identifier: Q9NRW3_C130
  MOD_RES (9)..(9): May or may not be conjugated to a chemical probe
RLYYFQYPCYQEGLRS

SEQ ID NO: 350 - protein, 8 aa, Homo sapiens
  Table 1 sequence identifier: P55265_C1224
  MOD_RES (6)..(6): May or may not be conjugated to a chemical probe
KNFYLCPV

SEQ ID NO: 351 - protein, 12 aa, Homo sapiens
  Table 1 sequence identifier: P48735_C308
  MOD_RES (10)..(10): May or may not be conjugated to a chemical probe
KSSGGFVWACKN

SEQ ID NO: 352 - protein, 24 aa, Homo sapiens
  Table 1 sequence identifier: O60664_C39
  MOD_RES (12)..(12): May or may not be conjugated to a chemical probe
RVASMPLISSTCDMVSAAYASTKE

SEQ ID NO: 353 - protein, 23 aa, Homo sapiens
  Table 1 sequence identifier: Q9NYL9_C150
  MOD_RES (3)..(3): May or may not be conjugated to a chemical probe
KFCNIMGSSNGVDQEHFSNVVKG

SEQ ID NO: 354 - protein, 32 aa, Homo sapiens
  Table 1 sequence identifier: Q9HCC0_C216
  MOD_RES (13)..(13): May or may not be conjugated to a chemical probe
KNIAQIAVVMGSCTAGGAYVPAMADENIIVRK

SEQ ID NO: 355 - protein, 28 aa, Homo sapiens
  Table 1 sequence identifier: Q16831_C162
  MOD_RES (25)..(25): May or may not be conjugated to a chemical probe
RIGTSGGIGLEPGTVVITEQAVDTCFKA

SEQ ID NO: 356 - protein, 20 aa, Homo sapiens
  Table 1 sequence identifier: O00244_C12
  MOD_RES (10)..(10): May or may not be conjugated to a chemical probe
KHEFSVDMTCGGCAEAVSRV

SEQ ID NO: 357 - protein, 11 aa, Homo sapiens
  Table 1 sequence identifier: P11216_C326
  MOD_RES (3)..(3): May or may not be conjugated to a chemical probe
RTCFETFPDKV

SEQ ID NO: 358 - protein, 9 aa, Homo sapiens
  Table 1 sequence identifier: P42166_C280
  MOD_RES (7)..(7): May or may not be conjugated to a chemical probe
RNLFISCKS

SEQ ID NO: 359 - protein, 20 aa, Homo sapiens
  Table 1 sequence identifier: O15372_C327
  MOD_RES (15)..(15): May or may not be conjugated to a chemical probe
RMDSLLIAGQINTYCQNIKE

SEQ ID NO: 360 - protein, 20 aa, Homo sapiens
  Table 1 sequence identifier: Q9BRP1_C82
  MOD_RES (10)..(10): May or may not be conjugated to a chemical probe
RLLHVFACACPGCSTGGARS

SEQ ID NO: 361 - protein, 10 aa, Homo sapiens
  Table 1 sequence identifier: Q15021_C767
  MOD_RES (5)..(5): May or may not be conjugated to a chemical probe
KVACCPLERC

SEQ ID NO: 362 - protein, 23 aa, Homo sapiens
  Table 1 sequence identifier: P30042_C177
  MOD_RES (14)..(14): May or may not be conjugated to a chemical probe
KEFHQAGKPIGLCCIAPVLAAKV

SEQ ID NO: 363 - protein, 11 aa, Homo sapiens
  Table 1 sequence identifier: Q13425_C391
  MOD_RES (9)..(9): May or may not be conjugated to a chemical probe
RLVHSGSGCRS

SEQ ID NO: 364 - protein, 14 aa, Homo sapiens
  Table 1 sequence identifier: O00159_C802
  MOD_RES (2)..(2): May or may not be conjugated to a chemical probe
RCPENAFFLDHVRT

SEQ ID NO: 365 - protein, 12 aa, Homo sapiens
  Table 1 sequence identifier: O95071_C2267
  MOD_RES (2)..(2): May or may not be conjugated to a chemical probe
RCATTPMAVHRV

SEQ ID NO: 366 - protein, 13 aa, Homo sapiens
  Table 1 sequence identifier: Q02809_C680
  MOD_RES (11)..(11): May or may not be conjugated to a chemical probe
RVGVDYEGGGCRF

SEQ ID NO: 367 - protein, 14 aa, Homo sapiens
  Table 1 sequence identifier: Q96RE7_C416
  MOD_RES (8)..(8): May or may not be conjugated to a chemical probe
RNTLANSCGTGIRS

SEQ ID NO: 368 - protein, 28 aa, Homo sapiens
  Table 1 sequence identifier: Q9UPQ0_C140
  MOD_RES (6)..(6): May or may not be conjugated to a chemical probe
KAANSCTSYSGTTLNLKEFEGLLAQMRK

SEQ ID NO: 369 - protein, 13 aa, Homo sapiens
  Table 1 sequence identifier: O14776_C1062
  MOD_RES (7)..(7): May or may not be conjugated to a chemical probe
RYLVLDCVPEERR

SEQ ID NO: 370 - protein, 19 aa, Homo sapiens
  Table 1 sequence identifier: Q9H410_C287
  MOD_RES (5)..(5): May or may not be conjugated to a chemical probe
KVFDCMELVMDELQGSVKQ

SEQ ID NO: 371 - protein, 24 aa, Homo sapiens
  Table 1 sequence identifier: Q12959_C378
  MOD_RES (9)..(9): May or may not be conjugated to a chemical probe
KLLAVNNVCLEEVTHEEAVTALKN

SEQ ID NO: 372 - protein, 10 aa, Homo sapiens
  Table 1 sequence identifier: Q86UV5_C39
  MOD_RES (7)..(7): May or may not be conjugated to a chemical probe
RIWLEPCIRG

SEQ ID NO: 373 - protein, 11 aa, Homo sapiens
  Table 1 sequence identifier: P50454_C156
  MOD_RES (6)..(6): May or may not be conjugated to a chemical probe
KQHYNCEHSKI

SEQ ID NO: 374 - protein, 22 aa, Homo sapiens
  Table 1 sequence identifier: Q99798_C451
  MOD_RES (15)..(15): May or may not be conjugated to a chemical probe
RDLGGIVLANACGPCIGQWDRK

SEQ ID NO: 375 - protein, 14 aa, Homo sapiens
  Table 1 sequence identifier: Q9P2T1_C186
  MOD_RES (10)..(10): May or may not be conjugated to a chemical probe
KVGIGPGSVCTTRK

SEQ ID NO: 376 - protein, 34 aa, Homo sapiens
  Table 1 sequence identifier: Q9BTW9_C850
  MOD_RES (19)..(19): May or may not be conjugated to a chemical probe
KAGAPDEAVCGENVSQIYCALLGCMDDYTTDSRG

SEQ ID NO: 377 - protein, 17 aa, Homo sapiens
  Table 1 sequence identifier: Q8NFH5_C255
  MOD_RES (2)..(2): May or may not be conjugated to a chemical probe
RCALSSPSLAFTPPIKT

SEQ ID NO: 378 - protein, 12 aa, Homo sapiens
  Table 1 sequence identifier: P32322_C120
  MOD_RES (2)..(2): May or may not be conjugated to a chemical probe
RCMTNTPVVVRE

SEQ ID NO: 379 - protein, 39 aa, Homo sapiens
  Table 1 sequence identifier: P50851_C1704
  MOD_RES (22)..(22): May or may not be conjugated to a chemical probe
RSLVNIPADGVTVDPALLPPACLGALGDLSVEQPVQFRS

SEQ ID NO: 380 - protein, 19 aa, Homo sapiens
  Table 1 sequence identifier: Q9UBR2_C173
  MOD_RES (14)..(14): May or may not be conjugated to a chemical probe
KDQECDKFNQCGTCNEFKE

SEQ ID NO: 381 - protein, 10 aa, Homo sapiens
  Table 1 sequence identifier: Q8IWV8_C1717
  MOD_RES (8)..(8): May or may not be conjugated to a chemical probe
RGNPLHLCKE

SEQ ID NO: 382 - protein, 42 aa, Homo sapiens
  Table 1 sequence identifier: O75369_C1087
  MOD_RES (4)..(4): May or may not be conjugated to a chemical probe
KIECSDNGDGTCSVSYLPTKPGEYFVNILFEEVHIPGSPFKA

SEQ ID NO: 383 - protein, 23 aa, Homo sapiens
  Table 1 sequence identifier: Q9Y4P1_C74
  MOD_RES (19)..(19): May or may not be conjugated to a chemical probe
KNFPAIGGTGPTSDTGWGCMLRC

SEQ ID NO: 384 - protein, 10 aa, Homo sapiens
  Table 1 sequence identifier: Q8TD19_C623
  MOD_RES (7)..(7): May or may not be conjugated to a chemical probe
RLLTFGCNKC

SEQ ID NO: 385 - protein, 18 aa, Homo sapiens
  Table 1 sequence identifier: Q9UMS0_C213
  MOD_RES (9)..(9): May or may not be conjugated to a chemical probe
KLQGSCTSCPSSIITLKN

SEQ ID NO: 386 - protein, 24 aa, Homo sapiens
  Table 1 sequence identifier: O94953_C694
  MOD_RES (16)..(16): May or may not be conjugated to a chemical probe
RTEPYCAICTLFYPYCQALQTEKE

SEQ ID NO: 387 - protein, 33 aa, Homo sapiens
  Table 1 sequence identifier: Q15149_C992
  MOD_RES (16)..(16): May or may not be conjugated to a chemical probe
KVLSSSGSEAAVPSVCFLVPPPNQEAQEAVTRL

SEQ ID NO: 388 - protein, 41 aa, Homo sapiens
  Table 1 sequence identifier: P14735_C974
  MOD_RES (14)..(14): May or may not be conjugated to a chemical probe
REMDSCPVVGEFPCQNDINLSQAPALPQPEVIQNMTEFKRG

SEQ ID NO: 389 - protein, 14 aa, Homo sapiens
  Table 1 sequence identifier: Q9NVG8_C282
  MOD_RES (8)..(8): May or may not be conjugated to a chemical probe
KSLDDSQCGITYKM

SEQ ID NO: 390 - protein, 21 aa, Homo sapiens
  Table 1 sequence identifier: Q86TI2_C844
  MOD_RES (2)..(2): May or may not be conjugated to a chemical probe
RCPESGEHYEVTLLHFLQEYL

SEQ ID NO: 391 - protein, 38 aa, Homo sapiens
  Table 1 sequence identifier: O94992_C84
  MOD_RES (35)..(35): May or may not be conjugated to a chemical probe
RAFPQLGGRPGPEGEGSLESQPPPLQTQACPESSCLRE

SEQ ID NO: 392 - protein, 17 aa, Homo sapiens
  Table 1 sequence identifier: Q86YH6_C71
  MOD_RES (2)..(2): May or may not be conjugated to a chemical probe
RCLLSDELSNIAMQVRK

SEQ ID NO: 393 - protein, 14 aa, Homo sapiens
  Table 1 sequence identifier: P19447_C342
  MOD_RES (9)..(9): May or may not be conjugated to a chemical probe
RSGVIVLPCGAGKS

SEQ ID NO: 394 - protein, 30 aa, Homo sapiens
  Table 1 sequence identifier: Q9Y3D2_C105
  MOD_RES (3)..(3): May or may not be conjugated to a chemical probe
KYCSGTGWPSFSEAHGTSGSDESHTGILRR

SEQ ID NO: 395 - protein, 27 aa, Homo sapiens
  Table 1 sequence identifier: Q9P253_C22
  MOD_RES (9)..(9): May or may not be conjugated to a chemical probe
RSAVLQPGCPSVGIPHSGYVNAQLEKE

SEQ ID NO: 396 - protein, 12 aa, Homo sapiens
  Table 1 sequence identifier: O75150_C890
  MOD_RES (6)..(6): May or may not be conjugated to a chemical probe
REIQPCLAESRA

SEQ ID NO: 397 - protein, 32 aa, Homo sapiens
  Table 1 sequence identifier: P04818_C199
  MOD_RES (15)..(15): May or may not be conjugated to a chemical probe
RDLPLMALPPCHALCQFYVVNSELSCQLYQRS

SEQ ID NO: 398 - protein, 23 aa, Homo sapiens
  Table 1 sequence identifier: Q00535_C157
  MOD_RES (2)..(2): May or may not be conjugated to a chemical probe
RCYSAEVVTLWYRPPDVLFGAKL

SEQ ID NO: 399 - protein, 11 aa, Homo sapiens
  Table 1 sequence identifier: Q96N67_C2125
  MOD_RES (8)..(8): May or may not be conjugated to a chemical probe
KAVLPVTCHRD

SEQ ID NO: 400 - protein, 10 aa, Homo sapiens
  Table 1 sequence identifier: O95340_C350
  MOD_RES (7)..(7): May or may not be conjugated to a chemical probe
RVWGTTCTKH

SEQ ID NO: 401 - protein, 29 aa, Homo sapiens
  Table 1 sequence identifier: Q96F86_C499
  MOD_RES (27)..(27): May or may not be conjugated to a chemical probe
RIYLCDIGIPQQVFQEVGINYHSPFGCKF

SEQ ID NO: 402 - protein, 11 aa, Homo sapiens
  Table 1 sequence identifier: Q6QNY0_C168
  MOD_RES (5)..(5): May or may not be conjugated to a chemical probe
RGDLCALAERL

SEQ ID NO: 403 - protein, 25 aa, Homo sapiens
  Table 1 sequence identifier: Q7Z3B4_C180
  MOD_RES (7)..(7): May or may not be conjugated to a chemical probe
KAVGYSCMPSNKDEDGLVVLVFNKK

SEQ ID NO: 404 - protein, 13 aa, Homo sapiens
  Table 1 sequence identifier: Q9UPT9_C171
  MOD_RES (7)..(7): May or may not be conjugated to a chemical probe
RKITSNCTIGLRG

SEQ ID NO: 405 - protein, 21 aa, Homo sapiens
  Table 1 sequence identifier: P45954_C175
  MOD_RES (6)..(6): May or may not be conjugated to a chemical probe
KVGSFCLSEAGAGSDSFALKT

SEQ ID NO: 406 - protein, 15 aa, Homo sapiens
  Table 1 sequence identifier: Q9UKT9_C434
  MOD_RES (12)..(12): May or may not be conjugated to a chemical probe
RSYELLKPPPICPRD

SEQ ID NO: 407 - protein, 20 aa, Homo sapiens
  Table 1 sequence identifier: Q9NR50_C281
  MOD_RES (14)..(14): May or may not be conjugated to a chemical probe
KEANTLNLAPYDACWNACRG

SEQ ID NO: 408 - protein, 14 aa, Homo sapiens
  Table 1 sequence identifier: Q9HB90_C377
  MOD_RES (3)..(3): May or may not be conjugated to a chemical probe
RSCGHQTSASSLKA

SEQ ID NO: 409 - protein, 23 aa, Homo sapiens
  Table 1 sequence identifier: Q5T0N5_C69
  MOD_RES (5)..(5): May or may not be conjugated to a chemical probe
RFTSCVAFFNILNELNDYAGQRE

SEQ ID NO: 410 - protein, 13 aa, Homo sapiens
  Table 1 sequence identifier: P07339_C117
  MOD_RES (7)..(7): May or may not be conjugated to a chemical probe
KLLDIACWIHHKY

SEQ ID NO: 411 - protein, 26 aa, Homo sapiens
  Table 1 sequence identifier: Q7Z6Z7_C3372
  MOD_RES (3)..(3): May or may not be conjugated to a chemical probe
KACSPCSSQSSSSGICTDFWDLLVKL

SEQ ID NO: 412 - protein, 10 aa, Homo sapiens
  Table 1 sequence identifier: O00267_C626
  MOD_RES (8)..(8): May or may not be conjugated to a chemical probe
RSFAFLHCKK

SEQ ID NO: 413 - protein, 10 aa, Homo sapiens
  Table 1 sequence identifier: O95347_C1174
  MOD_RES (5)..(5): May or may not be conjugated to a chemical probe
RFTQCQNGKI

SEQ ID NO: 414 - protein, 18 aa, Homo sapiens
  Table 1 sequence identifier: Q92616_C648
  MOD_RES (8)..(8): May or may not be conjugated to a chemical probe
RVLQEALCVISGVPGLKG

SEQ ID NO: 415 - protein, 26 aa, Homo sapiens
  Table 1 sequence identifier: P85037_C254
  MOD_RES (20)..(20): May or may not be conjugated to a chemical probe
RSMVSPVPSPTGTISVPNSCPASPRG

SEQ ID NO: 416 - protein, 14 aa, Homo sapiens
  Table 1 sequence identifier: P17655_C640
  MOD_RES (4)..(4): May or may not be conjugated to a chemical probe
KMPCQLHQVIVARF

SEQ ID NO: 417 - protein, 18 aa, Homo sapiens
  Table 1 sequence identifier: P50851_C2675
  MOD_RES (2)..(2): May or may not be conjugated to a chemical probe
KCSGIGDNPGSETAAPRA

SEQ ID NO: 418 - protein, 26 aa, Homo sapiens
  Table 1 sequence identifier: O14733_C131
  MOD_RES (20)..(20): May or may not be conjugated to a chemical probe
RYQAEINDLENLGEMGSGTCGQVWKM

SEQ ID NO: 419 - protein, 37 aa, Homo sapiens
  Table 1 sequence identifier: A6NED2_C139
  MOD_RES (34)..(34): May or may not be conjugated to a chemical probe
RGEPLWAQNVVPEAEGEDDPAGEAQAGRLPLLPCARA

SEQ ID NO: 420 - protein, 16 aa, Homo sapiens
  Table 1 sequence identifier: Q14980_C961
  MOD_RES (4)..(4): May or may not be conjugated to a chemical probe
RQFCSTQAALQAMERE

SEQ ID NO: 421 - protein, 22 aa, Homo sapiens
  Table 1 sequence identifier: Q9NYL2_C22
  MOD_RES (11)..(11): May or may not be conjugated to a chemical probe
KFDDLQFFENCGGGSFGSVYRA

SEQ ID NO: 422 - protein, 13 aa, Homo sapiens
  Table 1 sequence identifier: Q13867_C73
  MOD_RES (2)..(2): May or may not be conjugated to a chemical probe
RCWIFSCLNVMRL

SEQ ID NO: 423 - protein, 12 aa, Homo sapiens
  Table 1 sequence identifier: Q9BRJ7_C88
  MOD_RES (9)..(9): May or may not be conjugated to a chemical probe
RVLGLGLGCLRL

SEQ ID NO: 424 - protein, 17 aa, Homo sapiens
  Table 1 sequence identifier: Q96P48_C900
  MOD_RES (9)..(9): May or may not be conjugated to a chemical probe
RAVFPEGPCEEPLQLRK

SEQ ID NO: 425 - protein, 13 aa, Homo sapiens
  Table 1 sequence identifier: Q5MNZ6_C63
  MOD_RES (2)..(2): May or may not be conjugated to a chemical probe
RCNYLALVGGGKK

SEQ ID NO: 426 - protein, 26 aa, Homo sapiens
  Table 1 sequence identifier: Q13588_C161
  MOD_RES (6)..(6): May or may not be conjugated to a chemical probe
KSPGACFAQAQFDFSAQDPSQLSFRR

SEQ ID NO: 427 - protein, 17 aa, Homo sapiens
  Table 1 sequence identifier: H0Y2S0_C31
  MOD_RES (13)..(13): May or may not be conjugated to a chemical probe
RYTQQGFGNLPICMAKT

SEQ ID NO: 428 - protein, 14 aa, Homo sapiens
  Table 1 sequence identifier: Q9ULW0_C536
  MOD_RES (6)..(6): May or may not be conjugated to a chemical probe
RTVEICPFSFDSRD

SEQ ID NO: 429 - protein, 17 aa, Homo sapiens
  Table 1 sequence identifier: Q9HAV4_C646
  MOD_RES (2)..(2): May or may not be conjugated to a chemical probe
KCALMEALVLISNQFKN

SEQ ID NO: 430 - protein, 10 aa, Homo sapiens
  Table 1 sequence identifier: Q5T1V6_C414
  MOD_RES (5)..(5): May or may not be conjugated to a chemical probe
KNLPCANVRQ

SEQ ID NO: 431 - protein, 15 aa, Homo sapiens
  Table 1 sequence identifier: Q14181_C198
  MOD_RES (5)..(5): May or may not be conjugated to a chemical probe
KVLGCPEALTGSYKS

SEQ ID NO: 432 - protein, 26 aa, Homo sapiens
  Table 1 sequence identifier: Q8IZ73_C246
  MOD_RES (23)..(23): May or may not be conjugated to a chemical probe
RLLAENEDVVVVDKPSSIPVHPCGRF

SEQ ID NO: 433 - protein, 19 aa, Homo sapiens
  Table 1 sequence identifier: Q86UP2_C303
  MOD_RES (12)..(12): May or may not be conjugated to a chemical probe
KTMMFSEDEALCVVDLLKE

SEQ ID NO: 434 - protein, 16 aa, Homo sapiens
  Table 1 sequence identifier: Q9UGP4_C305
  MOD_RES (13)..(13): May or may not be conjugated to a chemical probe
RTPSVSAPLALSCPRQ

SEQ ID NO: 435 - protein, 25 aa, Homo sapiens
  Table 1 sequence identifier: P32929_C229
  MOD_RES (18)..(18): May or may not be conjugated to a chemical probe
KYMNGHSDVVMGLVSVNCESLHNRL

SEQ ID NO: 436 - protein, 18 aa, Homo sapiens
  Table 1 sequence identifier: Q7Z6Z7_C4367
  MOD_RES (11)..(11): May or may not be conjugated to a chemical probe
RHMLLLAIQECSEGFGLA

SEQ ID NO: 437 - protein, 22 aa, Homo sapiens
  Table 1 sequence identifier: P31153_C214
  MOD_RES (16)..(16): May or may not be conjugated to a chemical probe
RVHTIVISVQHDEEVCLDEMRD

SEQ ID NO: 438 - protein, 18 aa, Homo sapiens
  Table 1 sequence identifier: Q96NY7_C487
  MOD_RES (12)..(12): May or may not be conjugated to a chemical probe
RAGYDGESIGNCPFSQRL

SEQ ID NO: 439 - protein, 11 aa, Homo sapiens
  Table 1 sequence identifier: P14635_C238
  MOD_RES (7)..(7): May or may not be conjugated to a chemical probe
RFMQNNCVPKK

SEQ ID NO: 440 - protein, 44 aa, Homo sapiens
  Table 1 sequence identifier: Q13303_C248
  MOD_RES (27)..(27): May or may not be conjugated to a chemical probe
REKVEVQLPELFHKIGVGAMTWSPLACGIVSGKYDSGIPPYSRA

SEQ ID NO: 441 - protein, 12 aa, Homo sapiens
  Table 1 sequence identifier: Q9HAV4_C44
  MOD_RES (2)..(2): May or may not be conjugated to a chemical probe
KCPICVPCGLRL

SEQ ID NO: 442 - protein, 11 aa, Homo sapiens
  Table 1 sequence identifier: Q8ND24_C655
  MOD_RES (9)..(9): May or may not be conjugated to a chemical probe
RSSHAPATCKL

SEQ ID NO: 443 - protein, 14 aa, Homo sapiens
  Table 1 sequence identifier: Q9HB90_C358
  MOD_RES (11)..(11): May or may not be conjugated to a chemical probe
RKGLIDYNFHCFRK

SEQ ID NO: 444 - protein, 12 aa, Homo sapiens
  Table 1 sequence identifier: Q92878_C1296
  MOD_RES (6)..(6): May or may not be conjugated to a chemical probe
KNIDQCSEIVKC

SEQ ID NO: 445 - protein, 9 aa, Homo sapiens
  Table 1 sequence identifier: Q14149_C15
  MOD_RES (6)..(6): May or may not be conjugated to a chemical probe
RLSALCPKF

SEQ ID NO: 446 - protein, 46 aa, Homo sapiens
  Table 1 sequence identifier: P13798_C641
  MOD_RES (32)..(32): May or may not be conjugated to a chemical probe
RNPVINIASMLGSTDIPDWCVVEAGFPFSSDCLPDLSVWAEMLDKS

SEQ ID NO: 447 - protein, 45 aa, Homo sapiens
  Table 1 sequence identifier: Q01813_C563
  MOD_RES (40)..(40): May or may not be conjugated to a chemical probe
KHEEFCVPMVMVPATVSNNVPGSDFSIGADTALNTITDTCDRIKQ

SEQ ID NO: 448 - protein, 19 aa, Homo sapiens
  Table 1 sequence identifier: Q96T76_C549
  MOD_RES (16)..(16): May or may not be conjugated to a chemical probe
RVGESNLTNGDEPTQCSRH

SEQ ID NO: 449 - protein, 29 aa, Homo sapiens
  Table 1 sequence identifier: Q9BTE6_C209
  MOD_RES (13)..(13): May or may not be conjugated to a chemical probe
RVVNIEGVDSNMCCGTHVSNLSDLQVIKI

SEQ ID NO: 450 - protein, 18 aa, Homo sapiens
  Table 1 sequence identifier: Q9C0I1_C694
  MOD_RES (14)..(14): May or may not be conjugated to a chemical probe
RHHSQQAPQAEAPCLLRN

SEQ ID NO: 451 - protein, 24 aa, Homo sapiens
  Table 1 sequence identifier: P32320_C14
  MOD_RES (11)..(11): May or may not be conjugated to a chemical probe
KRPACTLKPECVQQLLVCSQEAKK

SEQ ID NO: 452 - protein, 16 aa, Homo sapiens
  Table 1 sequence identifier: Q9P2E9_C1323
  MOD_RES (14)..(14): May or may not be conjugated to a chemical probe
KLTAEFEEAQTSACRL

SEQ ID NO: 453 - protein, 15 aa, Homo sapiens
  Table 1 sequence identifier: P30876_C1093
  MOD_RES (3)..(3): May or may not be conjugated to a chemical probe
RDCQIAHGAAQFLRE

SEQ ID NO: 454 - protein, 17 aa, Homo sapiens
  Table 1 sequence identifier: P07237_C53
  MOD_RES (12)..(12): May or may not be conjugated to a chemical probe
KYLLVEFYAPWCGHCKA

SEQ ID NO: 455 - protein, 43 aa, Homo sapiens
  Table 1 sequence identifier: Q8IZ73_C431
  MOD_RES (10)..(10): May or may not be conjugated to a chemical probe
KQSLDVLDLCEGDLSPGLTDSTAPSSELGKDDLEELAAAAQKM

SEQ ID NO: 456 - protein, 15 aa, Homo sapiens
  Table 1 sequence identifier: Q6NZY4_C393
  MOD_RES (11)..(11): May or may not be conjugated to a chemical probe
RIFGSIPMQACQQKD

SEQ ID NO: 457 - protein, 14 aa, Homo sapiens
  Table 1 sequence identifier: Q96EB1_C218
  MOD_RES (5)..(5): May or may not be conjugated to a chemical probe
KVEPCSLTPGYTKL

SEQ ID NO: 458 - protein, 12 aa, Homo sapiens
  Table 1 sequence identifier: O60568_C691
  MOD_RES (10)..(10): May or may not be conjugated to a chemical probe
KGLDYEGGGCRF

SEQ ID NO: 459 - protein, 18 aa, Homo sapiens
  Table 1 sequence identifier: Q8WV74_C207
  MOD_RES (7)..(7): May or may not be conjugated to a chemical probe
RLAGLTCSGAEGLARPKQ

SEQ ID NO: 460 - protein, 27 aa, Homo sapiens
  Table 1 sequence identifier: Q7Z6Z7_C4341
  MOD_RES (12)..(12): May or may not be conjugated to a chemical probe
RSTDRLPSAHTCFNQLDLPAYESFEKL

SEQ ID NO: 461 - protein, 14 aa, Homo sapiens
  Table 1 sequence identifier: P16455_C145
  MOD_RES (11)..(11): May or may not be conjugated to a chemical probe
RGNPVPILIPCHRV

SEQ ID NO: 462 - protein, 12 aa, Homo sapiens
  Table 1 sequence identifier: Q86X76_C203
  MOD_RES (7)..(7): May or may not be conjugated to a chemical probe
KIGLAVCYDMRF

SEQ ID NO: 463 - protein, 16 aa, Homo sapiens
  Table 1 sequence identifier: Q9BR61_C267
  MOD_RES (14)..(14): May or may not be conjugated to a chemical probe
RDQDGCLPEEVTGCKT

SEQ ID NO: 464 - protein, 32 aa, Homo sapiens
  Table 1 sequence identifier: Q8IU81_C363
  MOD_RES (22)..(22): May or may not be conjugated to a chemical probe
REPAPAEALPQQYPEPAPAALCGPPPRAPSRN

SEQ ID NO: 465 - protein, 27 aa, Homo sapiens
  Table 1 sequence identifier: Q9Y5T5_C205
  MOD_RES (10)..(10): May or may not be conjugated to a chemical probe
KGLSNLGNTCFFNAVMQNLSQTPVLRE

SEQ ID NO: 466 - protein, 15 aa, Homo sapiens
  Table 1 sequence identifier: Q8IWZ3_C615
  MOD_RES (6)..(6): May or may not be conjugated to a chemical probe
RAGHLCTVQFLISKG

SEQ ID NO: 467 - protein, 39 aa, Homo sapiens
  Table 1 sequence identifier: Q13158_C105
  MOD_RES (29)..(29): May or may not be conjugated to a chemical probe
RRVDDFEAGAAAGAAPGEEDLCAAFNVICDNVGKDWRRL

SEQ ID NO: 468 - protein, 23 aa, Homo sapiens
  Table 1 sequence identifier: P29590_C213
  MOD_RES (9)..(9): May or may not be conjugated to a chemical probe
RGCSKPLCCSCALLDSSHSELKC

SEQ ID NO: 469 - protein, 20 aa, Homo sapiens
  Table 1 sequence identifier: Q00653_C57
  MOD_RES (4)..(4): May or may not be conjugated to a chemical probe
RYGCEGPSHGGLPGASSEKG

SEQ ID NO: 470 - protein, 34 aa, Homo sapiens
  Table 1 sequence identifier: Q9BVA1_C129
  MOD_RES (8)..(8): May or may not be conjugated to a chemical probe
KESESCDCLQGFQLTHSLGGGTGSGMGTLLISKI

SEQ ID NO: 471 - protein, 18 aa, Homo sapiens
  Table 1 sequence identifier: Q9NZA1_C191
  MOD_RES (12)..(12): May or may not be conjugated to a chemical probe
KAGIDGESIGNCPFSQRL

SEQ ID NO: 472 - protein, 15 aa, Homo sapiens
  Table 1 sequence identifier: O60551_C104
  MOD_RES (9)..(9): May or may not be conjugated to a chemical probe
RAMELLSACQGPARN

SEQ ID NO: 473 - protein, 18 aa, Homo sapiens
  Table 1 sequence identifier: Q16667_C39
  MOD_RES (4)..(4): May or may not be conjugated to a chemical probe
RVNCSQFLGLCALPGCKF

SEQ ID NO: 474 - protein, 14 aa, Homo sapiens
  Table 1 sequence identifier: A3KN83_C445
  MOD_RES (4)..(4): May or may not be conjugated to a chemical probe
KNLCPVGSSKPTKT

SEQ ID NO: 475 - protein, 10 aa, Homo sapiens
  Table 1 sequence identifier: Q8N999_C302
  MOD_RES (2)..(2): May or may not be conjugated to a chemical probe
KCLFNHFLKI

SEQ ID NO: 476 - protein, 11 aa, Homo sapiens
  Table 1 sequence identifier: Q6YN16_C166
  MOD_RES (4)..(4): May or may not be conjugated to a chemical probe
KQHCAYTIAKY

SEQ ID NO: 477 - protein, 24 aa, Homo sapiens
  Table 1 sequence identifier: Q9HB19_C332
  MOD_RES (22)..(22): May or may not be conjugated to a chemical probe
RSISLTRPGSSSLSSGPNSILCRG

SEQ ID NO: 478 - protein, 28 aa, Homo sapiens
  Table 1 sequence identifier: Q8WVV9_C464
  MOD_RES (19)..(19): May or may not be conjugated to a chemical probe
KNIIQPPSCVLHYYNVPLCVTEETFTKL

SEQ ID NO: 479 - protein, 43 aa, Homo sapiens
  Table 1 sequence identifier: O75175_C600
  MOD_RES (33)..(33): May or may not be conjugated to a chemical probe
RDIILSSTSAPPASAQPPLQLSEVNIPLSLGVCPLGPVPLTKE

SEQ ID NO: 480 - protein, 10 aa, Homo sapiens
  Table 1 sequence identifier: Q7L2J0_C419
  MOD_RES (8)..(8): May or may not be conjugated to a chemical probe
KFQYGNYCKY

SEQ ID NO: 481 - protein, 26 aa, Homo sapiens
  Table 1 sequence identifier: P36405_C174
  MOD_RES (24)..(24): May or may not be conjugated to a chemical probe
RVWQIQSCSALTGEGVQDGMNWVCKN

SEQ ID NO: 482 - protein, 18 aa, Homo sapiens
  Table 1 sequence identifier: Q9Y4X0_C175
  MOD_RES (3)..(3): May or may not be conjugated to a chemical probe
RGCIGTFSAMNLHSGLRE

SEQ ID NO: 483 - protein, 21 aa, Homo sapiens
  Table 1 sequence identifier: Q9NZB2_C531
  MOD_RES (13)..(13): May or may not be conjugated to a chemical probe
KGSQMGTVQPIPCLLSMPTRN

SEQ ID NO: 484 - protein, 12 aa, Homo sapiens
  Table 1 sequence identifier: P26358_C1478
  MOD_RES (6)..(6): May or may not be conjugated to a chemical probe
RGVCSCVEAGKA

SEQ ID NO: 485 - protein, 9 aa, Homo sapiens
  Table 1 sequence identifier: Q8TB03_C12
  MOD_RES (4)..(4): May or may not be conjugated to a chemical probe
RLNCAEYKN

SEQ ID NO: 486 - protein, 26 aa, Homo sapiens
  Table 1 sequence identifier: Q9Y676_C128
  MOD_RES (8)..(8): May or may not be conjugated to a chemical probe
KLLEQFVCAHTGIIFYAPYTGVCVKQ

SEQ ID NO: 487 - protein, 14 aa, Homo sapiens
  Table 1 sequence identifier: Q9Y613_C502
  MOD_RES (9)..(9): May or may not be conjugated to a chemical probe
RTPQSPAPCVLLRA

SEQ ID NO: 488 - protein, 35 aa, Homo sapiens
  Table 1 sequence identifier: Q99986_C50
  MOD_RES (13)..(13): May or may not be conjugated to a chemical probe
KVGLPIGQGGFGCIYLADMNSSESVGSDAPCVVKV

SEQ ID NO: 489 - protein, 44 aa, Homo sapiens
  Table 1 sequence identifier: P53992_C78
  MOD_RES (18)..(18): May or may not be conjugated to a chemical probe
RAPPSSGAPPASTAQAPCGQAAYGQFGQGDVQNGPSSTVQMQRL

SEQ ID NO: 490 - protein, 24 aa, Homo sapiens
  Table 1 sequence identifier: Q96RN5_C660
  MOD_RES (21)..(21): May or may not be conjugated to a chemical probe
RTFVPAMTAIHGPPITAPVVCTRK

SEQ ID NO: 491 - protein, 21 aa, Homo sapiens
  Table 1 sequence identifier: Q27J81_C332
  MOD_RES (12)..(12): May or may not be conjugated to a chemical probe
RAVLLASDAQECTLEEVVERL

SEQ ID NO: 492 - protein, 17 aa, Homo sapiens
  Table 1 sequence identifier: Q27J81_C971
  MOD_RES (6)..(6): May or may not be conjugated to a chemical probe
KQEEVCVIDALLADIRK

SEQ ID NO: 493 - protein, 15 aa, Homo sapiens
  Table 1 sequence identifier: Q9UBB4_C356
  MOD_RES (12)..(12): May or may not be conjugated to a chemical probe
KETTNIFSNCGCVRA

SEQ ID NO: 494 - protein, 42 aa, Homo sapiens
  Table 1 sequence identifier: Q08378_C1403
  MOD_RES (18)..(18): May or may not be conjugated to a chemical probe
KGEASSSNPATPIKIPDCPVPASLLEELLRPPPAVSKEPLKN

SEQ ID NO: 495 - protein, 14 aa, Homo sapiens
  Table 1 sequence identifier: Q8WWI1_C228
  MOD_RES (10)..(10): May or may not be conjugated to a chemical probe
RDSGYGDIWCPERG

SEQ ID NO: 496 - protein, 17 aa, Homo sapiens
  Table 1 sequence identifier: P10398_C597
  MOD_RES (10)..(10): May or may not be conjugated to a chemical probe
RTQADELPACLLSAARL

SEQ ID NO: 497 - protein, 22 aa, Homo sapiens
  Table 1 sequence identifier: Q9NZ32_C388
  MOD_RES (6)..(6): May or may not be conjugated to a chemical probe
RIPDWCSLNNPPLEMMFDVGKT

SEQ ID NO: 498 - protein, 18 aa, Homo sapiens
  Table 1 sequence identifier: Q9Y2X3_C106
  MOD_RES (6)..(6): May or may not be conjugated to a chemical probe
KLNLSCIHSPVVNELMRG

SEQ ID NO: 499 - protein, 42 aa, Homo sapiens
  Table 1 sequence identifier: P53396_C764
  MOD_RES (30)..(30): May or may not be conjugated to a chemical probe
RLTKPIVCWCIGTCATMFSSEVQFGHAGACANQASETAVAKN

SEQ ID NO: 500 - protein, 20 aa, Homo sapiens
  Table 1 sequence identifier: P18124_C186
  MOD_RES (6)..(6): May or may not be conjugated to a chemical probe
KYGIICMEDLIHEIYTVGKR

SEQ ID NO: 501 - protein, 26 aa, Homo sapiens
  Table 1 sequence identifier: Q9BUK6_C485
  MOD_RES (13)..(13): May or may not be conjugated to a chemical probe
RVAPPYPHLFSSCSPPGMVLDGSPKG

SEQ ID NO: 502 - protein, 18 aa, Homo sapiens
  Table 1 sequence identifier: O00541_C272
  MOD_RES (14)..(14): May or may not be conjugated to a chemical probe
KAGEGTYALDSESCMEKL

SEQ ID NO: 503 - protein, 13 aa, Homo sapiens
  Table 1 sequence identifier: Q9Y277_C65
  MOD_RES (3)..(3): May or may not be conjugated to a chemical probe
KVCNYGLTFTQKW

SEQ ID NO: 504 - protein, 13 aa, Homo sapiens
  Table 1 sequence identifier: Q02556_C306
  MOD_RES (11)..(11): May or may not be conjugated to a chemical probe
RVFCSGNAVVCKG

SEQ ID NO: 505 - protein, 11 aa, Homo sapiens
  Table 1 sequence identifier: Q01082_C112
  MOD_RES (4)..(4): May or may not be conjugated to a chemical probe
RIHCLENVDKA

SEQ ID NO: 506 - protein, 26 aa, Homo sapiens
  Table 1 sequence identifier: A2A288_C367
  MOD_RES (20)..(20): May or may not be conjugated to a chemical probe
RLAFSDDLGPLGPPLPVPACSLTPRL

SEQ ID NO: 507 - protein, 23 aa, Homo sapiens
  Table 1 sequence identifier: O14936_C914
  MOD_RES (11)..(11): May or may not be conjugated to a chemical probe
RHLEEAVELVCTAPQWVPVSWVY

SEQ ID NO: 508 - protein, 14 aa, Homo sapiens
  Table 1 sequence identifier: O43290_C645
  MOD_RES (10)..(10): May or may not be conjugated to a chemical probe
RGLAAALLLCQNKG

SEQ ID NO: 509 - protein, 27 aa, Homo sapiens
  Table 1 sequence identifier: Q9UBV8_C146
  MOD_RES (7)..(7): May or may not be conjugated to a chemical probe
KQALVNCNWSSFNDETCLMMINMFDKT

SEQ ID NO: 510 - protein, 21 aa, Homo sapiens
  Table 1 sequence identifier: Q6PCB5_C280
  MOD_RES (7)..(7): May or may not be conjugated to a chemical probe
KSIQTICSGLLTDVEDQAAKG

SEQ ID NO: 511 - protein, 18 aa, Homo sapiens
  Table 1 sequence identifier: Q08380_C561
  MOD_RES (8)..(8): May or may not be conjugated to a chemical probe
KSTSSFPCPAGHFNGFRT

SEQ ID NO: 512 - protein, 10 aa, Homo sapiens
  Table 1 sequence identifier: P57737_C34
  MOD_RES (8)..(8): May or may not be conjugated to a chemical probe
RAGTAPSCRN

SEQ ID NO: 513 - protein, 11 aa, Homo sapiens
  Table 1 sequence identifier: Q92616_C1235
  MOD_RES (2)..(2): May or may not be conjugated to a chemical probe
RCGLALALNKL

SEQ ID NO: 514 - protein, 26 aa, Homo sapiens
  Table 1 sequence identifier: P24468_C326
  MOD_RES (11)..(11): May or may not be conjugated to a chemical probe
KAIVLFTSDACGLSDVAHVESLQEKS

SEQ ID NO: 515 - protein, 26 aa, Homo sapiens
  Table 1 sequence identifier: Q96RP9_C153
  MOD_RES (18)..(18): May or may not be conjugated to a chemical probe
RVLDGAVLVLCAVGGVQCQTMTVNRQ

SEQ ID NO: 516 - protein, 21 aa, Homo sapiens
  Table 1 sequence identifier: Q9NRF9_C51
  MOD_RES (13)..(13): May or may not be conjugated to a chemical probe
RAASVFVLYATSCANNFAMKG

SEQ ID NO: 517 - protein, 25 aa, Homo sapiens
  Table 1 sequence identifier: P30837_C179
  MOD_RES (8)..(8): May or may not be conjugated to a chemical probe
RHEPVGVCGQIIPWNFPLVMQGWKL

SEQ ID NO: 518 - protein, 17 aa, Homo sapiens
  Table 1 sequence identifier: Q8WUM4_C90
  MOD_RES (10)..(10): May or may not be conjugated to a chemical probe
KFPFSENQICLTFTWKD

SEQ ID NO: 519 - protein, 21 aa, Homo sapiens
  Table 1 sequence identifier: Q9NP73_C86
  MOD_RES (14)..(14): May or may not be conjugated to a chemical probe
KADLVISHAGAGSCLETLEKG

SEQ ID NO: 520 - protein, 38 aa, Homo sapiens
  Table 1 sequence identifier: P13667_C91
  MOD_RES (33)..(33): May or may not be conjugated to a chemical probe
KEENGVLVLNDANFDNFVADKDTVLLEFYAPWCGHCKQ

SEQ ID NO: 521 - protein, 13 aa, Homo sapiens
  Table 1 sequence identifier: P09884_C1403
  MOD_RES (8)..(8): May or may not be conjugated to a chemical probe
RYIFDAECALEKL

SEQ ID NO: 522 - protein, 18 aa, Homo sapiens
  Table 1 sequence identifier: O95833_C22
  MOD_RES (12)..(12): May or may not be conjugated to a chemical probe
KASEDGESVGHCPSCQRL

SEQ ID NO: 523 - protein, 23 aa, Homo sapiens
  Table 1 sequence identifier: Q9NTX5_C133
  MOD_RES (13)..(13): May or may not be conjugated to a chemical probe
KSLGTPEDGMAVCMFMQNTLTRF

SEQ ID NO: 524 - protein, 18 aa, Homo sapiens
  Table 1 sequence identifier: Q14289_C899
  MOD_RES (5)..(5): May or may not be conjugated to a chemical probe
KNELCQLPPEGYVVVVKN

SEQ ID NO: 525 - protein, 13 aa, Homo sapiens
  Table 1 sequence identifier: P49792_C815
  MOD_RES (4)..(4): May or may not be conjugated to a chemical probe
KMICQQVEAIKKE

SEQ ID NO: 526 - protein, 16 aa, Homo sapiens
  Table 1 sequence identifier: Q14137_C404
  MOD_RES (9)..(9): May or may not be conjugated to a chemical probe
RDLQPFPTCQALVYRG

SEQ ID NO: 527 - protein, 11 aa, Homo sapiens
  Table 1 sequence identifier: Q15345_C297
  MOD_RES (2)..(2): May or may not be conjugated to a chemical probe
RCAAALMASRR

SEQ ID NO: 528 - protein, 13 aa, Homo sapiens
  Table 1 sequence identifier: Q99538_C219
  MOD_RES (7)..(7): May or may not be conjugated to a chemical probe
RESSYACYYDEKR

SEQ ID NO: 529 - protein, 19 aa, Homo sapiens
  Table 1 sequence identifier: Q96EK4_C48
  MOD_RES (7)..(7): May or may not be conjugated to a chemical probe
RAGVSGCFSTFQPTTGHRL

SEQ ID NO: 530 - protein, 15 aa, Homo sapiens
  Table 1 sequence identifier: O60488_C420
  MOD_RES (8)..(8): May or may not be conjugated to a chemical probe
KGYDAPLCNLLLFKK

SEQ ID NO: 531 - protein, 18 aa, Homo sapiens
  Table 1 sequence identifier: Q96EY5_C231
  MOD_RES (3)..(3): May or may not be conjugated to a chemical probe
KSCSPLAFSAFGDLTIKS

SEQ ID NO: 532 - protein, 44 aa, Homo sapiens
  Table 1 sequence identifier: P22307_C307
  MOD_RES (17)..(17): May or may not be conjugated to a chemical probe
KSGLTPNDIDVIELHDCFSTNELLTYEALGLCPEGQGATLVDRG

SEQ ID NO: 533 - protein, 24 aa, Homo sapiens
  Table 1 sequence identifier: Q969Z0_C335
  MOD_RES (21)..(21): May or may not be conjugated to a chemical probe
RLATDLLSLMPSLTSGEVAHCAKS

SEQ ID NO: 534 - protein, 18 aa, Homo sapiens
  Table 1 sequence identifier: P46734_C29
  MOD_RES (4)..(4): May or may not be conjugated to a chemical probe
RISCMSKPPAPNPTPPRN

SEQ ID NO: 535 - protein, 24 aa, Homo sapiens
  Table 1 sequence identifier: Q5JPI3_C308
  MOD_RES (17)..(17): May or may not be conjugated to a chemical probe
KFEQSDLEAFYNVITVCGTNEVRH

SEQ ID NO: 536 - protein, 45 aa, Homo sapiens
  Table 1 sequence identifier: Q9NRA8_C318
  MOD_RES (26)..(26): May or may not be conjugated to a chemical probe
RDAVLPEQSPGDFDFNEFFNLDKVPCLASMIEDVLGEGSVSASRF

SEQ ID NO: 537 - protein, 21 aa, Homo sapiens
  Table 1 sequence identifier: Q15648_C135
  MOD_RES (12)..(12): May or may not be conjugated to a chemical probe
KVAHHGENPVSCPELVQQLRE

SEQ ID NO: 538 - protein, 17 aa, Homo sapiens
  Table 1 sequence identifier: Q8IZ69_C463
  MOD_RES (8)..(8): May or may not be conjugated to a chemical probe
RVIGVELCPEAVEDARV

SEQ ID NO: 539 - protein, 8 aa, Homo sapiens
  Table 1 sequence identifier: Q04206_C38
  MOD_RES (4)..(4): May or may not be conjugated to a chemical probe
RYKCEGRS

SEQ ID NO: 540 - protein, 15 aa, Homo sapiens
  Table 1 sequence identifier: O15533_C115
  MOD_RES (12)..(12): May or may not be conjugated to a chemical probe
KWASGLTPAQNCPRA

SEQ ID NO: 541 - protein, 31 aa, Homo sapiens
  Table 1 sequence identifier: Q9UNI6_C23
  MOD_RES (4)..(4): May or may not be conjugated to a chemical probe
RVSCAGQMLEVQPGLYFGGAAAVAEPDHLRE

SEQ ID NO: 542 - protein, 15 aa, Homo sapiens
  Table 1 sequence identifier: Q9BUP3_C172
  MOD_RES (12)..(12): May or may not be conjugated to a chemical probe
RYSVFRPGVLLCDRQ

SEQ ID NO: 543 - protein, 19 aa, Homo sapiens
  Table 1 sequence identifier: P53384_C235
  MOD_RES (16)..(16): May or may not be conjugated to a chemical probe
KLPIIGVVENMSGFICPKC

SEQ ID NO: 544 - protein, 25 aa, Homo sapiens
  Table 1 sequence identifier: Q7Z5K2_C293
  MOD_RES (23)..(23): May or may not be conjugated to a chemical probe
RLENLNEAIEEDIVQSVLRPTNCRT

SEQ ID NO: 545 - protein, 21 aa, Homo sapiens
  Table 1 sequence identifier: Q9Y5S2_C1517
  MOD_RES (16)..(16): May or may not be conjugated to a chemical probe
RIRPLNSEGTLNLLNCEPPRL

SEQ ID NO: 546 - protein, 9 aa, Homo sapiens
  Table 1 sequence identifier: Q15024_C238
  MOD_RES (6)..(6): May or may not be conjugated to a chemical probe
KGVVTCMRK

SEQ ID NO: 547 - protein, 18 aa, Homo sapiens
  Table 1 sequence identifier: P40855_C128
  MOD_RES (15)..(15): May or may not be conjugated to a chemical probe
RVGSDMTSQQEFTSCLKE

SEQ ID NO: 548 - protein, 9 aa, Homo sapiens
  Table 1 sequence identifier: Q15910_C503
  MOD_RES (7)..(7): May or may not be conjugated to a chemical probe
RLWAAHCRK

SEQ ID NO: 549 - protein, 19 aa, Homo sapiens
  Table 1 sequence identifier: Q15149_C4071
  MOD_RES (8)..(8): May or may not be conjugated to a chemical probe
KFLEGTSCIAGVFVDATKE

SEQ ID NO: 550 - protein, 33 aa, Homo sapiens
  Table 1 sequence identifier: P22307_C94
  MOD_RES (21)..(21): May or may not be conjugated to a chemical probe
RAIYHSLGMTGIPIINVNNNCATGSTALFMARQ

SEQ ID NO: 551 - protein, 20 aa, Homo sapiens
  Table 1 sequence identifier: Q12789_C42
  MOD_RES (12)..(12): May or may not be conjugated to a chemical probe
RVPPFPLPLEPCTQEFLWRA

SEQ ID NO: 552 - protein, 38 aa, Homo sapiens
  Table 1 sequence identifier: Q15796_C81
  MOD_RES (9)..(9): May or may not be conjugated to a chemical probe
KCVTIPSTCSEIWGLSTPNTIDQWDTTGLYSFSEQTRS

SEQ ID NO: 553 - protein, 24 aa, Homo sapiens
  Table 1 sequence identifier: Q9UL15_C327
  MOD_RES (21)..(21): May or may not be conjugated to a chemical probe
KTELQGLIGQLDEVSLEKNPCIRE

SEQ ID NO: 554 - protein, 17 aa, Homo sapiens
  Table 1 sequence identifier: Q8N9T8_C673
  MOD_RES (12)..(12): May or may not be conjugated to a chemical probe
RLLGPTVMLGGCEFSRQ

SEQ ID NO: 555 - protein, 27 aa, Homo sapiens
  Table 1 sequence identifier: Q9Y679_C391
  MOD_RES (4)..(4): May or may not be conjugated to a chemical probe
KTGCVDLTITNLLEGAVAFMPEDITKG

SEQ ID NO: 556 - protein, 11 aa, Homo sapiens
  Table 1 sequence identifier: O14733_C260
  MOD_RES (3)..(3): May or may not be conjugated to a chemical probe
KLCDFGISGRL

SEQ ID NO: 557 - protein, 15 aa, Homo sapiens
  Table 1 sequence identifier: O75179_C644
  MOD_RES (6)..(6): May or may not be conjugated to a chemical probe
RAGHVCTVQFLISKG

SEQ ID NO: 558 - protein, 12 aa, Homo sapiens
  Table 1 sequence identifier: P31323_C388
  MOD_RES (6)..(6): May or may not be conjugated to a chemical probe
RLLGPCMEIMKR

SEQ ID NO: 559 - protein, 18 aa, Homo sapiens
  Table 1 sequence identifier: Q9HBL8_C154
  MOD_RES (4)..(4): May or may not be conjugated to a chemical probe
RLPCYFENLLSHFLPQKA

SEQ ID NO: 560 - protein, 24 aa, Homo sapiens
  Table 1 sequence identifier: Q96RU2_C171
  MOD_RES (7)..(7): May or may not be conjugated to a chemical probe
KNVGNTCWFSAVIQSLFQLPEFRR

SEQ ID NO: 561 - protein, 22 aa, Homo sapiens
  Table 1 sequence identifier: Q96T76_C750
  MOD_RES (12)..(12): May or may not be conjugated to a chemical probe
RELLELSCCHSCPFSSTAAAKC

SEQ ID NO: 562 - protein, 9 aa, Homo sapiens
  Table 1 sequence identifier: P17858_C89
  MOD_RES (2)..(2): May or may not be conjugated to a chemical probe
RCKAFTTRE

SEQ ID NO: 563 - protein, 16 aa, Homo sapiens
  Table 1 sequence identifier: Q96F07_C1112
  MOD_RES (4)..(4): May or may not be conjugated to a chemical probe
RLCCGLSMFEVILTRI

SEQ ID NO: 564 - protein, 9 aa, Homo sapiens
  Table 1 sequence identifier: P42695_C541
  MOD_RES (2)..(2): May or may not be conjugated to a chemical probe
RCVMAMLRR

SEQ ID NO: 565 - protein, 10 aa, Homo sapiens
  Table 1 sequence identifier: Q9Y2S7_C143
  MOD_RES (3)..(3): May or may not be conjugated to a chemical probe
RDCPHISQRS

SEQ ID NO: 566 - protein, 21 aa, Homo sapiens
  Table 1 sequence identifier: P52948_C1312
  MOD_RES (5)..(5): May or may not be conjugated to a chemical probe
RWLSCTATPQIEEEVSLTQKN

SEQ ID NO: 567 - protein, 25 aa, Homo sapiens
  Table 1 sequence identifier: Q9UER7_C664
  MOD_RES (3)..(3): May or may not be conjugated to a chemical probe
KICTLPSPPSPLASLAPVADSSTRV

SEQ ID NO: 568 - protein, 14 aa, Homo sapiens
  Table 1 sequence identifier: Q9H4L7_C772
  MOD_RES (6)..(6): May or may not be conjugated to a chemical probe
KNTEMCNVMMQLRK

SEQ ID NO: 569 - protein, 16 aa, Homo sapiens
  Table 1 sequence identifier: Q9Y570_C381
  MOD_RES (11)..(11): May or may not be conjugated to a chemical probe
RFAEPIGGFQCVFPGC

SEQ ID NO: 570 - protein, 27 aa, Homo sapiens
  Table 1 sequence identifier: P52701_C1117
  MOD_RES (17)..(17): May or may not be conjugated to a chemical probe
KTFFGDDFIPNDILIGCEEEEQENGKA

SEQ ID NO: 571 - protein, 15 aa, Homo sapiens
  Table 1 sequence identifier: P33992_C482
  MOD_RES (2)..(2): May or may not be conjugated to a chemical probe
RCSVLAAANSVFGRW

SEQ ID NO: 572 - protein, 10 aa, Homo sapiens
  Table 1 sequence identifier: E2QRD5_C183
  MOD_RES (2)..(2): May or may not be conjugated to a chemical probe
KCNFTGDGKT

SEQ ID NO: 573 - protein, 24 aa, Homo sapiens
  Table 1 sequence identifier: Q16877_C159
  MOD_RES (9)..(9): May or may not be conjugated to a chemical probe
KTFFVESICVDPEVIAANIVQVKL

SEQ ID NO: 574 - protein, 30 aa, Homo sapiens
  Table 1 sequence identifier: Q9BSQ5_C211
  MOD_RES (9)..(9): May or may not be conjugated to a chemical probe
KVAAEELCCLLGQVFQVVYTESTIDFLDRA

SEQ ID NO: 575 - protein, 10 aa, Homo sapiens
  Table 1 sequence identifier: Q00013_C179
  MOD_RES (8)..(8): May or may not be conjugated to a chemical probe
KKDNLIPCKE

SEQ ID NO: 576 - protein, 36 aa, Homo sapiens
  Table 1 sequence identifier: Q6UWP2_C226
  MOD_RES (2)..(2): May or may not be conjugated to a chemical probe
KCLKPEDVAEAVIYVLSTPAHIQIGDIQMRPTEQVT

SEQ ID NO: 577 - protein, 13 aa, Homo sapiens
  Table 1 sequence identifier: Q8N556_C713
  MOD_RES (11)..(11): May or may not be conjugated to a chemical probe
KSQAAPGSSPCRG

SEQ ID NO: 578 - protein, 19 aa, Homo sapiens
  Table 1 sequence identifier: Q9NXJ5_C149
  MOD_RES (4)..(4): May or may not be conjugated to a chemical probe
RYLCDFTYYTSLYQSHGRS

SEQ ID NO: 579 - protein, 18 aa, Homo sapiens
  Table 1 sequence identifier: Q8IYS1_C14
  MOD_RES (14)..(14): May or may not be conjugated to a chemical probe
MRPGGERPVEGGACNGRS

SEQ ID NO: 580 - protein, 10 aa, Homo sapiens
  Table 1 sequence identifier: Q92878_C48
  MOD_RES (7)..(7): May or may not be conjugated to a chemical probe
KTTIIECLKY

SEQ ID NO: 581 - protein, 22 aa, Homo sapiens
  Table 1 sequence identifier: Q68CZ2_C888
  MOD_RES (3)..(3): May or may not be conjugated to a chemical probe
RSCPETLTHAVGMSESPIGPKS

SEQ ID NO: 582 - protein, 17 aa, Homo sapiens
  Table 1 sequence identifier: O75592_C1131
  MOD_RES (2)..(2): May or may not be conjugated to a chemical probe
RCSILSPELALPTGSRA

SEQ ID NO: 583 - protein, 12 aa, Homo sapiens
  Table 1 sequence identifier: Q5VUA4_C1860
  MOD_RES (7)..(7): May or may not be conjugated to a chemical probe
KLSPQACSFTKA

SEQ ID NO: 584 - protein, 12 aa, Homo sapiens
  Table 1 sequence identifier: Q9H3M7_C170
  MOD_RES (4)..(4): May or may not be conjugated to a chemical probe
KVSCMFIPDGRV

SEQ ID NO: 585 - protein, 15 aa, Homo sapiens
  Table 1 sequence identifier: Q92619_C278
  MOD_RES (2)..(2): May or may not be conjugated to a chemical probe
RCEGGVDAALLYAKN

SEQ ID NO: 586 - protein, 16 aa, Homo sapiens
  Table 1 sequence identifier: P46013_C903
  MOD_RES (12)..(12): May or may not be conjugated to a chemical probe
KSEETNTEIVECILKR

SEQ ID NO: 587 - protein, 39 aa, Homo sapiens
  Table 1 sequence identifier: Q9UI30_C100
  MOD_RES (33)..(33): May or may not be conjugated to a chemical probe
KGPVEGYEENEEFLRTMHHLLLEVEVIEGTLQCPESGRM

SEQ ID NO: 588 - protein, 20 aa, Homo sapiens
  Table 1 sequence identifier: Q92797_C848
  MOD_RES (17)..(17): May or may not be conjugated to a chemical probe
RGMGMNSPELLLLVENCPKG

SEQ ID NO: 589 - protein, 8 aa, Homo sapiens
  Table 1 sequence identifier: P50990_C36
  MOD_RES (6)..(6): May or may not be conjugated to a chemical probe
RNIQACKE

SEQ ID NO: 590 - protein, 10 aa, Homo sapiens
  Table 1 sequence identifier: O76075_C194
  MOD_RES (7)..(7): May or may not be conjugated to a chemical probe
RVLGSMCQRL

SEQ ID NO: 591 - protein, 21 aa, Homo sapiens
  Table 1 sequence identifier: P04150_C302
  MOD_RES (7)..(7): May or may not be conjugated to a chemical probe
KLGTVYCQASFPGANIIGNKM

SEQ ID NO: 592 - protein, 25 aa, Homo sapiens
  Table 1 sequence identifier: Q96JH7_C219
  MOD_RES (17)..(17): May or may not be conjugated to a chemical probe
KSQECLIPVHVDGDGHCLVHAVSRA

SEQ ID NO: 593 - protein, 12 aa, Homo sapiens
  Table 1 sequence identifier: Q8NEC7_C140
  MOD_RES (3)..(3): May or may not be conjugated to a chemical probe
KACAEVSQWTRL

SEQ ID NO: 594 - protein, 18 aa, Homo sapiens
  Table 1 sequence identifier: P48200_C137
  MOD_RES (2)..(2): May or may not be conjugated to a chemical probe
KCAIQNAPNPGGGDLQKA

SEQ ID NO: 595 - protein, 20 aa, Homo sapiens
  Table 1 sequence identifier: Q8WTW3_C513
  MOD_RES (8)..(8): May or may not be conjugated to a chemical probe
KAQAISPCVQNFCSALDSKL

SEQ ID NO: 596 - protein, 17 aa, Homo sapiens
  Table 1 sequence identifier: Q9BYX2_C469
  MOD_RES (5)..(5): May or may not be conjugated to a chemical probe
RTQNCFLNSEIHQVTKI

SEQ ID NO: 597 - protein, 22 aa, Homo sapiens
  Table 1 sequence identifier: P51991_C85
  MOD_RES (10)..(10): May or may not be conjugated to a chemical probe
RGFGFVTYSCVEEVDAAMCARP

SEQ ID NO: 598 - protein, 37 aa, Homo sapiens
  Table 1 sequence identifier: Q5UIP0_C2298
  MOD_RES (18)..(18): May or may not be conjugated to a chemical probe
KESIPCPTESVYPPLVNCVAPVDIILPQITSNMWARG

SEQ ID NO: 599 - protein, 22 aa, Homo sapiens
  Table 1 sequence identifier: Q5T440_C170
  MOD_RES (13)..(13): May or may not be conjugated to a chemical probe
RVWAVLPSSPEACGAASLQERA

SEQ ID NO: 600 - protein, 8 aa, Homo sapiens
  Table 1 sequence identifier: P46821_C293
  MOD_RES (4)..(4): May or may not be conjugated to a chemical probe
RKSCFWKL

SEQ ID NO: 601 - protein, 20 aa, Homo sapiens
  Table 1 sequence identifier: Q9BT09_C166
  MOD_RES (3)..(3): May or may not be conjugated to a chemical probe
KQCDVLVEEFEEVIEDWYRN

SEQ ID NO: 602 - protein, 38 aa, Homo sapiens
  Table 1 sequence identifier: Q8IXB1_C480
  MOD_RES (33)..(33): May or may not be conjugated to a chemical probe
KESVNSHVTTLGPQNFPANDKEPWLVDFFAPWCPPCRA

SEQ ID NO: 603 - protein, 11 aa, Homo sapiens
  Table 1 sequence identifier: O00622_C39
  MOD_RES (2)..(2): May or may not be conjugated to a chemical probe
KCAPGVGLVRD

SEQ ID NO: 604 - protein, 22 aa, Homo sapiens
  Table 1 sequence identifier: Q69YN2_C288
  MOD_RES (12)..(12): May or may not be conjugated to a chemical probe
KQILAPVEESACQFFFDLNEKQ

SEQ ID NO: 605 - protein, 12 aa, Homo sapiens
  Table 1 sequence identifier: Q8TEX9_C708
  MOD_RES (5)..(5): May or may not be conjugated to a chemical probe
KLLECPHLNVRK

SEQ ID NO: 606 - protein, 31 aa, Homo sapiens
  Table 1 sequence identifier: Q9Y6W3_C197
  MOD_RES (24)..(24): May or may not be conjugated to a chemical probe
RAHFPLGANPFLERPQSFISPQSCDAQGQRY

SEQ ID NO: 607 - protein, 15 aa, Homo sapiens
  Table 1 sequence identifier: Q9Y6Y8_C604
  MOD_RES (2)..(2): May or may not be conjugated to a chemical probe
KCPGPLAVANGVVKQ

SEQ ID NO: 608 - protein, 11 aa, Homo sapiens
  Table 1 sequence identifier: Q9ULX6_C211
  MOD_RES (4)..(4): May or may not be conjugated to a chemical probe
RGQCMSGASRL

SEQ ID NO: 609 - protein, 15 aa, Homo sapiens
  Table 1 sequence identifier: Q13630_C116
  MOD_RES (9)..(9): May or may not be conjugated to a chemical probe
KVVSCLSTCIFPDKT

SEQ ID NO: 610 - protein, 18 aa, Homo sapiens
  Table 1 sequence identifier: P13667_C94
  MOD_RES (16)..(16): May or may not be conjugated to a chemical probe
KDTVLLEFYAPWCGHCKQ

SEQ ID NO: 611 - protein, 15 aa, Homo sapiens
  Table 1 sequence identifier: Q5T1V6_C453
  MOD_RES (13)..(13): May or may not be conjugated to a chemical probe
KLFKPPVLVFVDCKL

SEQ ID NO: 612 - protein, 24 aa, Homo sapiens
  Table 1 sequence identifier: Q9GZR2_C382
  MOD_RES (13)..(13): May or may not be conjugated to a chemical probe
KILGLQVQQAEHCSIQDAQAAMRL

SEQ ID NO: 613 - protein, 13 aa, Homo sapiens
  Table 1 sequence identifier: Q8WXD5_C91
  MOD_RES (11)..(11): May or may not be conjugated to a chemical probe
KLMHLFTSGDCKA

SEQ ID NO: 614 - protein, 15 aa, Homo sapiens
  Table 1 sequence identifier: Q15118_C71
  MOD_RES (12)..(12): May or may not be conjugated to a chemical probe
KQFLDFGSVNACEKT

SEQ ID NO: 615 - protein, 12 aa, Homo sapiens
  Table 1 sequence identifier: Q8WXE1_C585
  MOD_RES (4)..(4): May or may not be conjugated to a chemical probe
RFQCVFQVLPKC

SEQ ID NO: 616 - protein, 11 aa, Homo sapiens
  Table 1 sequence identifier: Q8N2W9_C326
  MOD_RES (6)..(6): May or may not be conjugated to a chemical probe
RVSLICPLVKM

SEQ ID NO: 617 - protein, 21 aa, Homo sapiens
  Table 1 sequence identifier: Q14141_C269
  MOD_RES (16)..(16): May or may not be conjugated to a chemical probe
RQYPWGTVQVENEAHCDFVKL

SEQ ID NO: 618 - protein, 25 aa, Homo sapiens
  Table 1 sequence identifier: P26358_C1071
  MOD_RES (13)..(13): May or may not be conjugated to a chemical probe
RCTVEYGEDLPECVQVYSMGGPNRF

SEQ ID NO: 619 - protein, 19 aa, Homo sapiens
  Table 1 sequence identifier: Q8IYQ7_C324
  MOD_RES (16)..(16): May or may not be conjugated to a chemical probe
RLGEMIETAYGENFACSKI

SEQ ID NO: 620 - protein, 11 aa, Homo sapiens
  Table 1 sequence identifier: P49419_C522
  MOD_RES (4)..(4): May or may not be conjugated to a chemical probe
RSTCTINYSKD

SEQ ID NO: 621 - protein, 14 aa, Homo sapiens
  Table 1 sequence identifier: Q9ULJ3_C129
  MOD_RES (10)..(10): May or may not be conjugated to a chemical probe
KTPQAPFPTCPNRK

SEQ ID NO: 622 - protein, 11 aa, Homo sapiens
  Table 1 sequence identifier: Q9HB19_C232
  MOD_RES (2)..(2): May or may not be conjugated to a chemical probe
KCEQDREPLRT

SEQ ID NO: 623 - protein, 13 aa, Homo sapiens
  Table 1 sequence identifier: O76031_C538
  MOD_RES (2)..(2): May or may not be conjugated to a chemical probe
KCELNVTEDALKA

SEQ ID NO: 624 - protein, 48 aa, Homo sapiens
  Table 1 sequence identifier: Q01581_C129
  MOD_RES (25)..(25): May or may not be conjugated to a chemical probe
KTNLMQLFEESGNTDIEGIDTTNACYGGTAAVFNAVNWIESSSWDGRY

SEQ ID NO: 625 - protein, 42 aa, Homo sapiens
  Table 1 sequence identifier: Q96RS6_C402
  MOD_RES (21)..(21): May or may not be conjugated to a chemical probe
RLMHLTSEELNPNPDKEKPPCNAQELEECDIFFEESSSLCRF

SEQ ID NO: 626 - protein, 20 aa, Homo sapiens
  Table 1 sequence identifier: Q9UL45_C95
  MOD_RES (5)..(5): May or may not be conjugated to a chemical probe
KFKECHSMLDINALFAEAKH

SEQ ID NO: 627 - protein, 18 aa, Homo sapiens
  Table 1 sequence identifier: Q9HAU4_C706
  MOD_RES (11)..(11): May or may not be conjugated to a chemical probe
RLFTIHQIDACTNNLPKA

SEQ ID NO: 628 - protein, 12 aa, Homo sapiens
  Table 1 sequence identifier: Q8TCG1_C337
  MOD_RES (2)..(2): May or may not be conjugated to a chemical probe
KCLEPTVALLRW

SEQ ID NO: 629 - protein, 9 aa, Homo sapiens
  Table 1 sequence identifier: Q9P0K7_C973
  MOD_RES (7)..(7): May or may not be conjugated to a chemical probe
KQILTMCKN

SEQ ID NO: 630 - protein, 26 aa, Homo sapiens
  Table 1 sequence identifier: Q7Z2Z2_C124
  MOD_RES (17)..(17): May or may not be conjugated to a chemical probe
RICDGCIIVVDAVEGVCPQTQAVLRQ

SEQ ID NO: 631 - protein, 14 aa, Homo sapiens
  Table 1 sequence identifier: Q5JTD0_C350
  MOD_RES (8)..(8): May or may not be conjugated to a chemical probe
RNSPLPNCTYATRQ

SEQ ID NO: 632 - protein, 24 aa, Homo sapiens
  Table 1 sequence identifier: Q15022_C325
  MOD_RES (19)..(19): May or may not be conjugated to a chemical probe
RLQLLDGEYEVAMQEMEECPISKK

SEQ ID NO: 633 - protein, 37 aa, Homo sapiens
  Table 1 sequence identifier: P30837_C320
  MOD_RES (32)..(32): May or may not be conjugated to a chemical probe
KSPSIVLADADMEHAVEQCHEALFFNMGQCCCAGSRT

SEQ ID NO: 634 - protein, 13 aa, Homo sapiens
  Table 1 sequence identifier: Q9H0L4_C150
  MOD_RES (3)..(3): May or may not be conjugated to a chemical probe
KLCVQNSHQEARN

SEQ ID NO: 635 - protein, 13 aa, Homo sapiens
  Table 1 sequence identifier: Q03169_C45
  MOD_RES (8)..(8): May or may not be conjugated to a chemical probe
KGLANVFCVFTKG

SEQ ID NO: 636 - protein, 22 aa, Homo sapiens
  Table 1 sequence identifier: Q9UBB4_C354
  MOD_RES (17)..(17): May or may not be conjugated to a chemical probe
RVIHVAGKETTNIFSNCGCVRA

SEQ ID NO: 637 - protein, 23 aa, Homo sapiens
  Table 1 sequence identifier: Q06187_C481
  MOD_RES (16)..(16): May or may not be conjugated to a chemical probe
KQRPIFIITEYMANGCLLNYLRE

SEQ ID NO: 638 - protein, 24 aa, Homo sapiens
  Table 1 sequence identifier: Q96N21_C302
  MOD_RES (4)..(4): May or may not be conjugated to a chemical probe
RALCAIASLGSSDLLPQEHILLRT

SEQ ID NO: 639 - protein, 9 aa, Homo sapiens
  Table 1 sequence identifier: Q92878_C102
  MOD_RES (5)..(5): May or may not be conjugated to a chemical probe
RSMVCTQKS

SEQ ID NO: 640 - protein, 29 aa, Homo sapiens
  Table 1 sequence identifier: Q7Z401_C117
  MOD_RES (6)..(6): May or may not be conjugated to a chemical probe
RLKQGCEIIQSTPYGRPANISGSTSSQRI

SEQ ID NO: 641 - protein, 9 aa, Homo sapiens
  Table 1 sequence identifier: Q9H307_C249
  MOD_RES (3)..(3): May or may not be conjugated to a chemical probe
RMCPATQKL

SEQ ID NO: 642 - protein, 16 aa, Homo sapiens
  Table 1 sequence identifier: Q96DF8_C263
  MOD_RES (2)..(2): May or may not be conjugated to a chemical probe
RCQLQQAAALNAQHKQ

SEQ ID NO: 643 - protein, 16 aa, Homo sapiens
  Table 1 sequence identifier: Q7L8W6_C88
  MOD_RES (2)..(2): May or may not be conjugated to a chemical probe
KCEGDEVEDLYELLKL

SEQ ID NO: 644 - protein, 18 aa, Homo sapiens
  Table 1 sequence identifier: Q13232_C158
  MOD_RES (7)..(7): May or may not be conjugated to a chemical probe
RADELLCWEDSAGHWLYE

SEQ ID NO: 645 - protein, 11 aa, Homo sapiens
  Table 1 sequence identifier: Q9NWA0_C139
  MOD_RES (4)..(4): May or may not be conjugated to a chemical probe
KSLCMFEIPKE

SEQ ID NO: 646 - protein, 19 aa, Homo sapiens
  Table 1 sequence identifier: Q9BZ67_C191
  MOD_RES (15)..(15): May or may not be conjugated to a chemical probe
RVQLGPYQPGRPAACDLRE

SEQ ID NO: 647 - protein, 18 aa, Homo sapiens
  Table 1 sequence identifier: P51617_C608
  MOD_RES (9)..(9): May or may not be conjugated to a chemical probe
RSWHLTPSCPLDPAPLRE

SEQ ID NO: 648 - protein, 18 aa, Homo sapiens
  Table 1 sequence identifier: Q9Y4W2_C140
  MOD_RES (2)..(2): May or may not be conjugated to a chemical probe
KCLAQEVNIPDWIVDLRH

SEQ ID NO: 649 - protein, 16 aa, Homo sapiens
  Table 1 sequence identifier: Q9NX18_C83
  MOD_RES (7)..(7): May or may not be conjugated to a chemical probe
RGMLENCILLSLFAKE

SEQ ID NO: 650 - protein, 20 aa, Homo sapiens
  Table 1 sequence identifier: Q969H6_C146
  MOD_RES (3)..(3): May or may not be conjugated to a chemical probe
RSCLLEEEEESGEEAAEAME

SEQ ID NO: 651 - protein, 15 aa, Homo sapiens
  Table 1 sequence identifier: Q96IV0_C309
  MOD_RES (2)..(2): May or may not be conjugated to a chemical probe
RCGEWANCFTLCCRA

SEQ ID NO: 652 - protein, 13 aa, Homo sapiens
  Table 1 sequence identifier: P42575_C370
  MOD_RES (10)..(10): May or may not be conjugated to a chemical probe
RSDMICGYACLKG

SEQ ID NO: 653 - protein, 14 aa, Homo sapiens
  Table 1 sequence identifier: P51812_C436
  MOD_RES (12)..(12): May or may not be conjugated to a chemical probe
KEDIGVGSYSVCKR

SEQ ID NO: 654 - protein, 8 aa, Homo sapiens
  Table 1 sequence identifier: P09086_C346
  MOD_RES (5)..(5): May or may not be conjugated to a chemical probe
RVWFCNRR

SEQ ID NO: 655 - protein, 23 aa, Homo sapiens
  Table 1 sequence identifier: Q8IWV7_C1603
  MOD_RES (13)..(13): May or may not be conjugated to a chemical probe
RNSLIELPDDYSCLLNQASHFRC

SEQ ID NO: 656 - protein, 9 aa, Homo sapiens
  Table 1 sequence identifier: Q9H0W8_C380
  MOD_RES (6)..(6): May or may not be conjugated to a chemical probe
RREDFCPRK

SEQ ID NO: 657 - protein, 13 aa, Homo sapiens
  Table 1 sequence identifier: O96017_C231
  MOD_RES (8)..(8): May or may not be conjugated to a chemical probe
KTLGSGACGEVKL

SEQ ID NO: 658 - protein, 17 aa, Homo sapiens
  Table 1 sequence identifier: Q96RU3_C70
  MOD_RES (15)..(15): May or may not be conjugated to a chemical probe
KKNSKEEEEYKYTSCKA

SEQ ID NO: 659 - protein, 11 aa, Homo sapiens
  Table 1 sequence identifier: O95347_C326
  MOD_RES (6)..(6): May or may not be conjugated to a chemical probe
KKNLACEESKR

SEQ ID NO: 660 - protein, 15 aa, Homo sapiens
  Table 1 sequence identifier: O15357_C926
  MOD_RES (10)..(10): May or may not be conjugated to a chemical probe
RKPAFTEASCPLSRL

SEQ ID NO: 661 - protein, 32 aa, Homo sapiens
  Table 1 sequence identifier: Q8N5L8_C131
  MOD_RES (9)..(9): May or may not be conjugated to a chemical probe
RDPLDPNECGYQPPGAPPGLGSMPSSSCGPRS

SEQ ID NO: 662 - protein, 9 aa, Homo sapiens
  Table 1 sequence identifier: Q9C0I1_C152
  MOD_RES (6)..(6): May or may not be conjugated to a chemical probe
RVFQFCLRY

SEQ ID NO: 663 - protein, 17 aa, Homo sapiens
  Table 1 sequence identifier: Q96F86_C137
  MOD_RES (14)..(14): May or may not be conjugated to a chemical probe
KSQDVAVSPQQQQCSKS

SEQ ID NO: 664 - protein, 10 aa, Homo sapiens
  Table 1 sequence identifier: O60443_C45
  MOD_RES (4)..(4): May or may not be conjugated to a chemical probe
RFWCWQRPKY

SEQ ID NO: 665 - protein, 14 aa, Homo sapiens
  Table 1 sequence identifier: Q9NU22_C1011
  MOD_RES (4)..(4): May or may not be conjugated to a chemical probe
KLICQHIVPGNVKS

SEQ ID NO: 666 - protein, 21 aa, Homo sapiens
  Table 1 sequence identifier: Q14204_C1059
  MOD_RES (8)..(8): May or may not be conjugated to a chemical probe
KVWLQYQCLWDMQAENIYNRL

SEQ ID NO: 667 - protein, 14 aa, Homo sapiens
  Table 1 sequence identifier: Q09472_C1738
  MOD_RES (2)..(2): May or may not be conjugated to a chemical probe
RCIQSLVHACQCRN

SEQ ID NO: 668 - protein, 18 aa, Homo sapiens
  Table 1 sequence identifier: P12532_C316
  MOD_RES (8)..(8): May or may not be conjugated to a chemical probe
RLGYILTCPSNLGTGLRA

SEQ ID NO: 669 - protein, 16 aa, Homo sapiens
  Table 1 sequence identifier: Q9P2X3_C195
  MOD_RES (13)..(13): May or may not be conjugated to a chemical probe
RSTFQAHLAPVVCPKQ

SEQ ID NO: 670 - protein, 14 aa, Homo sapiens
  Table 1 sequence identifier: Q92667_C147
  MOD_RES (7)..(7): May or may not be conjugated to a chemical probe
KSIPLECPLSSPKG

SEQ ID NO: 671 - protein, 22 aa, Homo sapiens
  Table 1 sequence identifier: O14879_C283
  MOD_RES (18)..(18): May or may not be conjugated to a chemical probe
RVLESTPNNGYLYHQIGCCYKA

SEQ ID NO: 672 - protein, 30 aa, Homo sapiens
  Table 1 sequence identifier: Q01201_C109
  MOD_RES (25)..(25): May or may not be conjugated to a chemical probe
RGAASLSTVTLGPVAPPATPPPWGCPLGRL

SEQ ID NO: 673 - protein, 16 aa, Homo sapiens
  Table 1 sequence identifier: Q9UPN9_C582
  MOD_RES (6)..(6): May or may not be conjugated to a chemical probe
RGNMNCGAFQAHQMRL

SEQ ID NO: 674 - protein, 11 aa, Homo sapiens
  Table 1 sequence identifier: Q9BSD7_C110
  MOD_RES (3)..(3): May or may not be conjugated to a chemical probe
RVCVIDEIGKM

SEQ ID NO: 675 - protein, 18 aa, Homo sapiens
  Table 1 sequence identifier: Q8IV53_C174
  MOD_RES (9)..(9): May or may not be conjugated to a chemical probe
RGNSKPLSCFVAPDSGRL

SEQ ID NO: 676 - protein, 19 aa, Homo sapiens
  Table 1 sequence identifier: Q99798_C385
  MOD_RES (8)..(8): May or may not be conjugated to a chemical probe
RVGLIGSCTNSSYEDMGRS

SEQ ID NO: 677 - protein, 26 aa, Homo sapiens
  Table 1 sequence identifier: Q14204_C3089
  MOD_RES (2)..(2): May or may not be conjugated to a chemical probe
RCVLNWFGDWSTEALYQVGKEFTSKM

SEQ ID NO: 678 - protein, 12 aa, Homo sapiens
  Table 1 sequence identifier: P49903_C31
  MOD_RES (10)..(10): May or may not be conjugated to a chemical probe
RFTELKGTGCKV

SEQ ID NO: 679 - protein, 19 aa, Homo sapiens
  Table 1 sequence identifier: Q70CQ2_C741
  MOD_RES (17)..(17): May or may not be conjugated to a chemical probe
RTGDFLGETIGNELFNCRQ

SEQ ID NO: 680 - protein, 27 aa, Homo sapiens
  Table 1 sequence identifier: O43439_C111
  MOD_RES (23)..(23): May or may not be conjugated to a chemical probe
RFSNGPASSTSSALTNQQLPATCGARQ

SEQ ID NO: 681 - protein, 20 aa, Homo sapiens
  Table 1 sequence identifier: Q9BWH6_C1039
  MOD_RES (2)..(2): May or may not be conjugated to a chemical probe
RCGQGTLLAQACQDLPSIRN

SEQ ID NO: 682 - protein, 21 aa, Homo sapiens
  Table 1 sequence identifier: Q6AI12_C209
  MOD_RES (12)..(12): May or may not be conjugated to a chemical probe
RTPESTKPGPVCQPPVSQSRS

SEQ ID NO: 683 - protein, 28 aa, Homo sapiens
  Table 1 sequence identifier: Q5GLZ8_C60
  MOD_RES (17)..(17): May or may not be conjugated to a chemical probe
RHTVFVLDDGTVYTCGCNDLGQLGHEKS

SEQ ID NO: 684 - protein, 12 aa, Homo sapiens
  Table 1 sequence identifier: Q9Y5A7_C52
  MOD_RES (5)..(5): May or may not be conjugated to a chemical probe
RLECCENEVEKV

SEQ ID NO: 685 - protein, 18 aa, Homo sapiens
  Table 1 sequence identifier: Q6PJG6_C326
  MOD_RES (14)..(14): May or may not be conjugated to a chemical probe
RTQAFQVLLQPLACVLKA

SEQ ID NO: 686 - protein, 25 aa, Homo sapiens
  Table 1 sequence identifier: Q6PJG6_C673
  MOD_RES (4)..(4): May or may not be conjugated to a chemical probe
RTHCPYAVALPEVAPAQPLTEALRA

SEQ ID NO: 687 - protein, 14 aa, Homo sapiens
  Table 1 sequence identifier: Q8NB90_C672
  MOD_RES (11)..(11): May or may not be conjugated to a chemical probe
KGVLLYGPPGCSKT

SEQ ID NO: 688 - protein, 13 aa, Homo sapiens
  Table 1 sequence identifier: Q9ULT8_C1855
  MOD_RES (7)..(7): May or may not be conjugated to a chemical probe
KLLQLSCNGNVKS

SEQ ID NO: 689 - protein, 11 aa, Homo sapiens
  Table 1 sequence identifier: Q9NUI1_C22
  MOD_RES (5)..(5): May or may not be conjugated to a chemical probe
RHLFCPDLLRD

SEQ ID NO: 690 - protein, 21 aa, Homo sapiens
  Table 1 sequence identifier: Q9P0V9_C293
  MOD_RES (16)..(16): May or may not be conjugated to a chemical probe
RQYPWGVVQVENENHCDFVKL

SEQ ID NO: 691 - protein, 9 aa, Homo sapiens
  Table 1 sequence identifier: Q8WX93_C964
  MOD_RES (5)..(5): May or may not be conjugated to a chemical probe
KVSSCEQRL

SEQ ID NO: 692 - protein, 15 aa, Homo sapiens
  Table 1 sequence identifier: Q9Y4B4_C820
  MOD_RES (4)..(4): May or may not be conjugated to a chemical probe
RAGCLGVNLIGANRV

SEQ ID NO: 693 - protein, 21 aa, Homo sapiens
  Table 1 sequence identifier: P41226_C599
  MOD_RES (17)..(17): May or may not be conjugated to a chemical probe
RAPASAAASEDAPYPVCTVRY

SEQ ID NO: 694 - protein, 11 aa, Homo sapiens
  Table 1 sequence identifier: Q9BZQ6_C441
  MOD_RES (4)..(4): May or may not be conjugated to a chemical probe
RVPCGFAAMKD

SEQ ID NO: 695 - protein, 30 aa, Homo sapiens
  Table 1 sequence identifier: P52732_C87
  MOD_RES (5)..(5): May or may not be conjugated to a chemical probe
RSVVCPILDEVIMGYNCTIFAYGQTGTGKT

SEQ ID NO: 696 - protein, 8 aa, Homo sapiens
  Table 1 sequence identifier: P14598_C378
  MOD_RES (2)..(2): May or may not be conjugated to a chemical probe
RCSESTKR

SEQ ID NO: 697 - protein, 13 aa, Homo sapiens
  Table 1 sequence identifier: Q9UL40_C68
  MOD_RES (4)..(4): May or may not be conjugated to a chemical probe
KNQCLFTNTQCKV

SEQ ID NO: 698 - protein, 13 aa, Homo sapiens
  Table 1 sequence identifier: Q9C0C9_C375
  MOD_RES (3)..(3): May or may not be conjugated to a chemical probe
KNCAQGEGSMAKK

SEQ ID NO: 699 - protein, 14 aa, Homo sapiens
  Table 1 sequence identifier: O14733_C280
  MOD_RES (5)..(5): May or may not be conjugated to a chemical probe
RSAGCAAYMAPERI

SEQ ID NO: 700 - protein, 19 aa, Homo sapiens
  Table 1 sequence identifier: O95239_C269
  MOD_RES (5)..(5): May or may not be conjugated to a chemical probe
RGLLCLGNVISALGDDKKG

SEQ ID NO: 701 - protein, 12 aa, Homo sapiens
  Table 1 sequence identifier: Q8WYP5_C521
  MOD_RES (2)..(2): May or may not be conjugated to a chemical probe
RCLVAGLLSPRF

SEQ ID NO: 702 - protein, 21 aa, Homo sapiens
  Table 1 sequence identifier: Q93074_C1188
  MOD_RES (8)..(8): May or may not be conjugated to a chemical probe
KTPQLNPCQSDGNKPTVGIRS

SEQ ID NO: 703 - protein, 30 aa, Homo sapiens
  Table 1 sequence identifier: Q16610_C284
  MOD_RES (3)..(3): May or may not be conjugated to a chemical probe
RACPSHQPDISSGLELPFPPGVPTLDNIKN

SEQ ID NO: 704 - protein, 33 aa, Homo sapiens
  Table 1 sequence identifier: O00622_C134
  MOD_RES (17)..(17): May or may not be conjugated to a chemical probe
KHQCTCIDGAVGCIPLCPQELSLPNLGCPNPRL

SEQ ID NO: 705 - protein, 18 aa, Homo sapiens
  Table 1 sequence identifier: Q2VPK5_C433
  MOD_RES (7)..(7): May or may not be conjugated to a chemical probe
RTPPGPCCSPGVGWAQRC

SEQ ID NO: 706 - protein, 20 aa, Homo sapiens
  Table 1 sequence identifier: Q9UI10_C444
  MOD_RES (17)..(17): May or may not be conjugated to a chemical probe
RAHNVPVLVCCETYKFCERV

SEQ ID NO: 707 - protein, 28 aa, Homo sapiens
  Table 1 sequence identifier: Q9UPW5_C1164
  MOD_RES (26)..(26): May or may not be conjugated to a chemical probe
RLTSPLEYNLPSSLLDFENDLIESSCKV

SEQ ID NO: 708 - protein, 24 aa, Homo sapiens
  Table 1 sequence identifier: Q13613_C117
  MOD_RES (7)..(7): May or may not be conjugated to a chemical probe
KDVMYICPFMGAVSGTLTVTDFKL

SEQ ID NO: 709 - protein, 16 aa, Homo sapiens
  Table 1 sequence identifier: O00541_C361
  MOD_RES (4)..(4): May or may not be conjugated to a chemical probe
KSLCIGATYDVTDSRI

SEQ ID NO: 710 - protein, 24 aa, Homo sapiens
  Table 1 sequence identifier: P39877_C46
  MOD_RES (16)..(16): May or may not be conjugated to a chemical probe
KVTGKNALTNYGFYGCYCGWGGRG

SEQ ID NO: 711 - protein, 24 aa, Homo sapiens
  Table 1 sequence identifier: Q14207_C1059
  MOD_RES (21)..(21): May or may not be conjugated to a chemical probe
KSEETTVPFPEESIVPAAKPCHRR

SEQ ID NO: 712 - protein, 23 aa, Homo sapiens
  Table 1 sequence identifier: P42704_C500
  MOD_RES (9)..(9): May or may not be conjugated to a chemical probe
RAILQENGCLSDSDMFSQAGLRS

SEQ ID NO: 713 - protein, 18 aa, Homo sapiens
  Table 1 sequence identifier: Q9Y5R8_C115
  MOD_RES (5)..(5): May or may not be conjugated to a chemical probe
KNPLCPLGQTVQSELFRS

SEQ ID NO: 714 - protein, 20 aa, Homo sapiens
  Table 1 sequence identifier: O60566_C504
  MOD_RES (17)..(17): May or may not be conjugated to a chemical probe
KIPGMTLSSSVCQVNCCARE

SEQ ID NO: 715 - protein, 13 aa, Homo sapiens
  Table 1 sequence identifier: Q5T440_C259
  MOD_RES (3)..(3): May or may not be conjugated to a chemical probe
KGCYIGQELTART

SEQ ID NO: 716 - protein, 26 aa, Homo sapiens
  Table 1 sequence identifier: Q5TGY3_C1540
  MOD_RES (12)..(12): May or may not be conjugated to a chemical probe
RGPAAAAAGYGCPLLSDLTLSPVPRD

SEQ ID NO: 717 - protein, 17 aa, Homo sapiens
  Table 1 sequence identifier: P43403_C117
  MOD_RES (14)..(14): May or may not be conjugated to a chemical probe
RPSGLEPQPGVFDCLRD

SEQ ID NO: 718 - protein, 15 aa, Homo sapiens
  Table 1 sequence identifier: P07602_C48
  MOD_RES (3)..(3): May or may not be conjugated to a chemical probe
KHCLQTVWNKPTVKS

SEQ ID NO: 719 - protein, 14 aa, Homo sapiens
  Table 1 sequence identifier: Q93074_C444
  MOD_RES (2)..(2): May or may not be conjugated to a chemical probe
KCQEATAGFTIGRV

SEQ ID NO: 720 - protein, 25 aa, Homo sapiens
  Table 1 sequence identifier: Q96FA3_C282
  MOD_RES (11)..(11): May or may not be conjugated to a chemical probe
RQEINAARPQCPVGFNTLAFPSMKR

SEQ ID NO: 721 - protein, 10 aa, Homo sapiens
  Table 1 sequence identifier: Q8IY17_C1199
  MOD_RES (7)..(7): May or may not be conjugated to a chemical probe
RLAYVSCVRQ

SEQ ID NO: 722 - protein, 22 aa, Homo sapiens
  Table 1 sequence identifier: Q8IY18_C91
  MOD_RES (6)..(6): May or may not be conjugated to a chemical probe
KSSIVCAICLGLAGKPAFMGRA

SEQ ID NO: 723 - protein, 14 aa, Homo sapiens
  Table 1 sequence identifier: Q9NTJ3_C110
  MOD_RES (4)..(4): May or may not be conjugated to a chemical probe
RFSCIIGPNGSGKS

SEQ ID NO: 724 - protein, 26 aa, Homo sapiens
  Table 1 sequence identifier: Q07065_C100
  MOD_RES (23)..(23): May or may not be conjugated to a chemical probe
KSSSSSSASAAAAAAAASSSASCSRR

SEQ ID NO: 725 - protein, 42 aa, Homo sapiens
  Table 1 sequence identifier: P51812_C599
  MOD_RES (8)..(8): May or may not be conjugated to a chemical probe
RQGYDAACDIWSLGVLLYTMLTGYTPFANGPDDTPEEILARI

SEQ ID NO: 726 - protein, 22 aa, Homo sapiens
  Table 1 sequence identifier: Q86U44_C500
  MOD_RES (13)..(13): May or may not be conjugated to a chemical probe
KGNPQGFNQGLDCDVIVAEVRS

SEQ ID NO: 727 - protein, 16 aa, Homo sapiens
  Table 1 sequence identifier: Q9H479_C24
  MOD_RES (10)..(10): May or may not be conjugated to a chemical probe
RAFGGPGAGCISEGRA

SEQ ID NO: 728 - protein, 17 aa, Homo sapiens
  Table 1 sequence identifier: Q9UPT9_C44
  MOD_RES (6)..(6): May or may not be conjugated to a chemical probe
RAIYQCFVWSGTAEARK

SEQ ID NO: 729 - protein, 27 aa, Homo sapiens
  Table 1 sequence identifier: P30042_C244
  MOD_RES (10)..(10): May or may not be conjugated to a chemical probe
KVVTTPAFMCETALHYIHDGIGAMVRK

SEQ ID NO: 730 - protein, 26 aa, Homo sapiens
  Table 1 sequence identifier: Q8NFY9_C490
  MOD_RES (20)..(20): May or may not be conjugated to a chemical probe
RIQGLAAVYKDSIYYIAGTCGNHQRM

SEQ ID NO: 731 - protein, 19 aa, Homo sapiens
  Table 1 sequence identifier: Q9UHQ1_C99
  MOD_RES (8)..(8): May or may not be conjugated to a chemical probe
KVLVVSVCPQSLPYFAAKF

SEQ ID NO: 732 - protein, 18 aa, Homo sapiens
  Table 1 sequence identifier: Q15042_C218
  MOD_RES (4)..(4): May or may not be conjugated to a chemical probe
KIGCPLTPLPPVSIAIRF

SEQ ID NO: 733 - protein, 11 aa, Homo sapiens
  Table 1 sequence identifier: Q9H0E9_C26
  MOD_RES (3)..(3): May or may not be conjugated to a chemical probe
KLCLASSVMRS

SEQ ID NO: 734 - protein, 10 aa, Homo sapiens
  Table 1 sequence identifier: P51878_C315
  MOD_RES (8)..(8): May or may not be conjugated to a chemical probe
KVIIVQACRG

SEQ ID NO: 735 - protein, 21 aa, Homo sapiens
  Table 1 sequence identifier: Q9UPQ9_C600
  MOD_RES (10)..(10): May or may not be conjugated to a chemical probe
RSYRPTHPDCQAVLQTLLSRT

SEQ ID NO: 736 - protein, 22 aa, Homo sapiens
  Table 1 sequence identifier: P27540_C119
  MOD_RES (16)..(16): May or may not be conjugated to a chemical probe
KMTAYITELSDMVPTCSALARK

SEQ ID NO: 737 - protein, 20 aa, Homo sapiens
  Table 1 sequence identifier: Q96C01_C57
  MOD_RES (2)..(2): May or may not be conjugated to a chemical probe
RCHVPLAQAQALVTSELEKF

SEQ ID NO: 738 - protein, 19 aa, Homo sapiens
  Table 1 sequence identifier: Q9NQZ5_C302
  MOD_RES (3)..(3): May or may not be conjugated to a chemical probe
RYCVSWMVSSGMPDFLEKL

SEQ ID NO: 739 - protein, 11 aa, Homo sapiens
  Table 1 sequence identifier: Q9H9P8_C376
  MOD_RES (3)..(3): May or may not be conjugated to a chemical probe
KACFLGATVKY

SEQ ID NO: 740 - protein, 9 aa, Homo sapiens
  Table 1 sequence identifier: Q8NBX0_C238
  MOD_RES (7)..(7): May or may not be conjugated to a chemical probe
RWPISYCRE

SEQ ID NO: 741 - protein, 25 aa, Homo sapiens
  Table 1 sequence identifier: Q8NFF5_C499
  MOD_RES (10)..(10): May or may not be conjugated to a chemical probe
RTDPYSCSLCPFSPTDPGWPAFMRI

SEQ ID NO: 742 - protein, 14 aa, Homo sapiens
  Table 1 sequence identifier: Q6PJG6_C228
  MOD_RES (2)..(2): May or may not be conjugated to a chemical probe
RCQSPWTEALWVRL

SEQ ID NO: 743 - protein, 40 aa, Homo sapiens
  Table 1 sequence identifier: Q9C0C2_C749
  MOD_RES (24)..(24): May or may not be conjugated to a chemical probe
KDLQSEFGITGDPQPSSFSPSSWCQGASQDYGLGGASPRG

SEQ ID NO: 744 - protein, 26 aa, Homo sapiens
  Table 1 sequence identifier: Q9Y4C1_C251
  MOD_RES (20)..(20): May or may not be conjugated to a chemical probe
KIVDPSLIHVEVVHDNLVTCGNSARI

SEQ ID NO: 745 - protein, 29 aa, Homo sapiens
  Table 1 sequence identifier: Q8N5C7_C235
  MOD_RES (22)..(22): May or may not be conjugated to a chemical probe
KIFTDERLQGLLQVELKTRKTCFWRHQKG

SEQ ID NO: 746 - protein, 10 aa, Homo sapiens
  Table 1 sequence identifier: Q9BVP2_C131
  MOD_RES (5)..(5): May or may not be conjugated to a chemical probe
KKLYCQELKK

SEQ ID NO: 747 - protein, 28 aa, Homo sapiens
  Table 1 sequence identifier: Q6ZS81_C1963
  MOD_RES (23)..(23): May or may not be conjugated to a chemical probe
RDGKEPQPSAEAAAAPSLANISCFTQKL

SEQ ID NO: 748 - protein, 30 aa, Homo sapiens
  Table 1 sequence identifier: O94829_C217
  MOD_RES (27)..(27): May or may not be conjugated to a chemical probe
RTSLAVECGAVFPLLEQLLQQPSSPSCVRQ

SEQ ID NO: 749 - protein, 25 aa, Homo sapiens
  Table 1 sequence identifier: Q9BRT3_C33
  MOD_RES (10)..(10): May or may not be conjugated to a chemical probe
RIVVEYCEPCGFEATYLELASAVKE

SEQ ID NO: 750 - protein, 10 aa, Homo sapiens
  Table 1 sequence identifier: Q9BRJ7_C171
  MOD_RES (2)..(2): May or may not be conjugated to a chemical probe
KCQLLFALKV

SEQ ID NO: 751 - protein, 13 aa, Homo sapiens
  Table 1 sequence identifier: Q96NE9_C306
  MOD_RES (9)..(9): May or may not be conjugated to a chemical probe
RKLIYYTGCPMRS

SEQ ID NO: 752 - protein, 28 aa, Homo sapiens
  Table 1 sequence identifier: Q70CQ2_C1090
  MOD_RES (10)..(10): May or may not be conjugated to a chemical probe
RLATSAYDGCSNSELCGMDQFWGIALRA

SEQ ID NO: 753 - protein, 18 aa, Homo sapiens
  Table 1 sequence identifier: O00622_C70
  MOD_RES (13)..(13): May or may not be conjugated to a chemical probe
TQPCDHTKKTQPCDHTKG

SEQ ID NO: 754 - protein, 13 aa, Homo sapiens
  Table 1 sequence identifier: Q6VMQ6_C612
  MOD_RES (7)..(7): May or may not be conjugated to a chemical probe
KLCALQCAVFDKT

SEQ ID NO: 755 - protein, 41 aa, Homo sapiens
  Table 1 sequence identifier: P68371_C213
  MOD_RES (28)..(28): May or may not be conjugated to a chemical probe
  MOD_RES (38)..(38): May or may not be conjugated to a chemical probe
KVSDTVVEPYNATLSVHQLVENTDETYCIDNEALYDICFRT

SEQ ID NO: 756 - protein, 21 aa, Homo sapiens
  Table 1 sequence identifier: P04150_C622
  MOD_RES (9)..(9): May or may not be conjugated to a chemical probe
RQSSANLLCFAPDLIINEQRM

SEQ ID NO: 757 - protein, 38 aa, Homo sapiens
  Table 1 sequence identifier: Q8WVB6_C280
  MOD_RES (28)..(28): May or may not be conjugated to a chemical probe
RSGEEEAAQPLGAPEEEPTDGQDASSHCLWVDEFAPRH

SEQ ID NO: 758 - protein, 16 aa, Homo sapiens
  Table 1 sequence identifier: Q7Z401_C1289
  MOD_RES (12)..(12): May or may not be conjugated to a chemical probe
RLWSSPAFSPTCPFRE

SEQ ID NO: 759 - protein, 19 aa, Homo sapiens
  Table 2 sequence identifier: P04406_C152
  MOD_RES (8)..(8): May or may not be conjugated to a chemical probe
KIISNASCTTNCLAPLAKV

SEQ ID NO: 760 - protein, 38 aa, Homo sapiens
  Table 2 sequence identifier: P61978_C132
  MOD_RES (30)..(30): May or may not be conjugated to a chemical probe
KIIPTLEEGLQLPSPTATSQLPLESDAVECLNYQHYKG

SEQ ID NO: 761 - protein, 24 aa, Homo sapiens
  Table 2 sequence identifier: Q13526_C113
  MOD_RES (19)..(19): May or may not be conjugated to a chemical probe
KIKSGEEDFESLASQFSDCSSAKA

SEQ ID NO: 762 - protein, 21 aa, Homo sapiens
  Table 2 sequence identifier: P24752_C119
  MOD_RES (15)..(15): May or may not be conjugated to a chemical probe
RQAVLGAGLPISTPCTTINKV

SEQ ID NO: 763 - protein, 25 aa, Homo sapiens
  Table 2 sequence identifier: P24752_C413
  MOD_RES (11)..(11): May or may not be conjugated to a chemical probe
KQGEYGLASICNGGGGASAMLIQKL

SEQ ID NO: 764 - protein, 29 aa, Homo sapiens
  Table 2 sequence identifier: Q9NUY8_C283
  MOD_RES (26)..(26): May or may not be conjugated to a chemical probe
KFLENTPSSLNIEDIEDLFSLAQYYCSKT

SEQ ID NO: 765 - protein, 28 aa, Homo sapiens
  Table 2 sequence identifier: P13667_C206
  MOD_RES (23)..(23): May or may not be conjugated to a chemical probe
KENFDEVVNDADIILVEFYAPWCGHCKK

SEQ ID NO: 766 - protein, 15 aa, Homo sapiens
  Table 2 sequence identifier: P12268_C140
  MOD_RES (5)..(5): May or may not be conjugated to a chemical probe
RHGFCGIPITDTGRM

SEQ ID NO: 767 - protein, 25 aa, Homo sapiens
  Table 2 sequence identifier: Q15365_C194
  MOD_RES (18)..(18): May or may not be conjugated to a chemical probe
RVMTIPYQPMPASSPVICAGGQDRC

SEQ ID NO: 768 - protein, 14 aa, Homo sapiens
  Table 2 sequence identifier: Q9NVC6_C649
  MOD_RES (12)..(12): May or may not be conjugated to a chemical probe
KMELLMSALSPCLL

SEQ ID NO: 769 - protein, 38 aa, Homo sapiens; identical to SEQ ID NO: 79
  Table 2 sequence identifier: P42166_C561
  MOD_RES (27)..(27): May or may not be conjugated to a chemical probe

SEQ ID NO: 770 - protein, 18 aa, Homo sapiens
  Table 2 sequence identifier: Q9Y696_C35
  MOD_RES (12)..(12): May or may not be conjugated to a chemical probe
KAGSDGESIGNCPFSQRL

SEQ ID NO: 771 - protein, 17 aa, Homo sapiens
  Table 2 sequence identifier: P10599_C32
  MOD_RES (12)..(12): May or may not be conjugated to a chemical probe
KLVVVDFSATWCGPCKM

SEQ ID NO: 772 - protein, 15 aa, Homo sapiens
  Table 2 sequence identifier: P31943_C267
  MOD_RES (6)..(6): May or may not be conjugated to a chemical probe
RDLNYCFSGMSDHRY

SEQ ID NO: 773 - protein, 21 aa, Homo sapiens
  Table 2 sequence identifier: Q86SX6_C67
  MOD_RES (9)..(9): May or may not be conjugated to a chemical probe
KGTPEQPQCGFSNAVVQILRL

SEQ ID NO: 774 - protein, 13 aa, Homo sapiens
  Table 2 sequence identifier: P15121_C299
  MOD_RES (3)..(3): May or may not be conjugated to a chemical probe
RVCALLSCTSHKD

SEQ ID NO: 775 - protein, 15 aa, Homo sapiens
  Table 2 sequence identifier: P52597_C267
  MOD_RES (6)..(6): May or may not be conjugated to a chemical probe
RDLSYCLSGMYDHRY

SEQ ID NO: 776 - protein, 11 aa, Homo sapiens
  Table 2 sequence identifier: Q9ULV4_C420
  MOD_RES (3)..(3): May or may not be conjugated to a chemical probe
KKCDLISIPKK

SEQ ID NO: 777 - protein, 18 aa, Homo sapiens
  Table 2 sequence identifier: P62888_C92
  MOD_RES (3)..(3): May or may not be conjugated to a chemical probe
RVCTLAIIDPGDSDIIRS

SEQ ID NO: 778 - protein, 12 aa, Homo sapiens
  Table 2 sequence identifier: Q9NQR4_C153
  MOD_RES (7)..(7): May or may not be conjugated to a chemical probe
RVGLGICYDMRF

SEQ ID NO: 779 - protein, 21 aa, Homo sapiens
  Table 2 sequence identifier: P42765_C92
  MOD_RES (3)..(3): May or may not be conjugated to a chemical probe
RLCGSGFQSIVNGCQEICVKE

SEQ ID NO: 780 - protein, 25 aa, Homo sapiens
  Table 2 sequence identifier: Q15084_C55
  MOD_RES (19)..(19): May or may not be conjugated to a chemical probe
REVIQSDSLWLVEFYAPWCGHCQRL

SEQ ID NO: 781 - protein, 31 aa, Homo sapiens; identical to SEQ ID NO: 52
  Table 2 sequence identifier: Q96HE7_C241
  MOD_RES (27)..(27): May or may not be conjugated to a chemical probe

SEQ ID NO: 782 - protein, 16 aa, Homo sapiens
  Table 2 sequence identifier: Q99439_C164
  MOD_RES (5)..(5): May or may not be conjugated to a chemical probe
KAGQCVIGLQMGTNKC

SEQ ID NO: 783 - protein, 21 aa, Homo sapiens
  Table 2 sequence identifier: P25205_C119
  MOD_RES (6)..(6): May or may not be conjugated to a chemical probe
RTLTSCFLSCVVCVEGIVTKC

SEQ ID NO: 784 - protein, 19 aa, Homo sapiens
  Table 2 sequence identifier: Q9NS86_C187
  MOD_RES (5)..(5): May or may not be conjugated to a chemical probe
RSVVCQESDLPDELLYGRA

SEQ ID NO: 785 - protein, 13 aa, Homo sapiens
  Table 2 sequence identifier: Q15233_C145
  MOD_RES (4)..(4): May or may not be conjugated to a chemical probe
RFACHSASLTVRN

SEQ ID NO: 786 - protein, 16 aa, Homo sapiens
  Table 2 sequence identifier: Q9BRA2_C43
  MOD_RES (4)..(4): May or may not be conjugated to a chemical probe
KSWCPDCVQAEPVVRE

SEQ ID NO: 787 - protein, 25 aa, Homo sapiens
  Table 2 sequence identifier: P35611_C68
  MOD_RES (12)..(12): May or may not be conjugated to a chemical probe
RVSMILQSPAFCEELESMIQEQFKK

SEQ ID NO: 788 - protein, 18 aa, Homo sapiens
  Table 2 sequence identifier: O75521_C380
  MOD_RES (7)..(7): May or may not be conjugated to a chemical probe
RWLSDECTNAVVNFLSRK

SEQ ID NO: 789 - protein, 29 aa, Homo sapiens
  Table 2 sequence identifier: Q9BXW7_C392
  MOD_RES (4)..(4): May or may not be conjugated to a chemical probe
RDLCFSPGLMEASHVVNDVNEAVQLVFRK

SEQ ID NO: 790 - protein, 46 aa, Homo sapiens
  Table 2 sequence identifier: P30101_C406
  MOD_RES (41)..(41): May or may not be conjugated to a chemical probe
KSEPIPESNDGPVKVVVAENFDEIVNNENKDVLIEFYAPWCGHCKN

SEQ ID NO: 791 - protein, 25 aa, Homo sapiens
  Table 2 sequence identifier: Q96AB3_C114
  MOD_RES (13)..(13): May or may not be conjugated to a chemical probe
RSVLLCGIEAQACILNTTLDLLDRG

SEQ ID NO: 792 - protein, 18 aa, Homo sapiens
  Table 2 sequence identifier: P13667_C555
  MOD_RES (13)..(13): May or may not be conjugated to a chemical probe
KKDVLIEFYAPWCGHCKQ

SEQ ID NO: 793 - protein, 26 aa, Homo sapiens
  Table 2 sequence identifier: Q09161_C44
  MOD_RES (4)..(4): May or may not be conjugated to a chemical probe
KSACSLESNLEGLAGVLEADLPNYKS

SEQ ID NO: 794 - protein, 9 aa, Homo sapiens
  Table 2 sequence identifier: P78417_C32
  MOD_RES (3)..(3): May or may not be conjugated to a chemical probe
RFCPFAERT

SEQ ID NO: 795 - protein, 14 aa, Homo sapiens
  Table 2 sequence identifier: Q9ULW0_C536
  MOD_RES (6)..(6): May or may not be conjugated to a chemical probe
RTVEICPFSFDSRD

SEQ ID NO: 796 - protein, 17 aa, Homo sapiens
  Table 2 sequence identifier: Q9NRG0_C55
  MOD_RES (9)..(9): May or may not be conjugated to a chemical probe
KATELFVQCLATYSYRH

SEQ ID NO: 797 - protein, 33 aa, Homo sapiens; identical to SEQ ID NO: 105
  Table 2 sequence identifier: Q96T76_C848
  MOD_RES (26)..(26): May or may not be conjugated to a chemical probe

SEQ ID NO: 798 - protein, 24 aa, Homo sapiens
  Table 2 sequence identifier: Q8TAQ2_C145
  MOD_RES (17)..(17): May or may not be conjugated to a chemical probe
KSLVQNNCLSRPNIFLCPEIEPKL

SEQ ID NO: 799 - protein, 28 aa, Homo sapiens
  Table 2 sequence identifier: Q9BVC5_C10
  MOD_RES (3)..(3): May or may not be conjugated to a chemical probe
RSCTDSELLLHPELLSQEFLLLTLEQKN

SEQ ID NO: 800 - protein, 20 aa, Homo sapiens
  Table 2 sequence identifier: Q7Z2W4_C645
  MOD_RES (17)..(17): May or may not be conjugated to a chemical probe
KNSNVDSSYLESLYQSCPRG

SEQ ID NO: 801 - protein, 28 aa, Homo sapiens
  Table 2 sequence identifier: Q9BQ69_C186
  MOD_RES (24)..(24): May or may not be conjugated to a chemical probe
KLEVDAIVNAANSSLLGGGGVDGCIHRA

SEQ ID NO: 802 - protein, 28 aa, Homo sapiens
  Table 2 sequence identifier: Q16831_C162
  MOD_RES (25)..(25): May or may not be conjugated to a chemical probe
RIGTSGGIGLEPGTVVITEQAVDTCFKA

SEQ ID NO: 803 - protein, 25 aa, Homo sapiens
  Table 2 sequence identifier: P30101_C57
  MOD_RES (20)..(20): May or may not be conjugated to a chemical probe
RISDTGSAGLMLVEFFAPWCGHCKR

SEQ ID NO: 804 - protein, 29 aa, Homo sapiens
  Table 2 sequence identifier: P12268_C331
  MOD_RES (10)..(10): May or may not be conjugated to a chemical probe
RVGMGSGSICITQEVLACGRPQATAVYKV

SEQ ID NO: 805 - protein, 11 aa, Homo sapiens
  Table 2 sequence identifier: O95571_C170
  MOD_RES (8)..(8): May or may not be conjugated to a chemical probe
RTDFQQGCAKT

SEQ ID NO: 806 - protein, 11 aa, Homo sapiens
  Table 2 sequence identifier: O00299_C24
  MOD_RES (5)..(5): May or may not be conjugated to a chemical probe
KIGNCPFSQRL

SEQ ID NO: 807 - protein, 28 aa, Homo sapiens
  Table 2 sequence identifier: O14879_C343
  MOD_RES (20)..(20): May or may not be conjugated to a chemical probe
KGLNPLNAYSDLAEFLETECYQTPFNKE

SEQ ID NO: 808 - protein, 19 aa, Homo sapiens
  Table 2 sequence identifier: Q96CM8_C64
  MOD_RES (16)..(16): May or may not be conjugated to a chemical probe
RMVSTPIGGLSYVQGCTKK

SEQ ID NO: 809 - protein, 13 aa, Homo sapiens
  Table 2 sequence identifier: P51946_C244
  MOD_RES (3)..(3): May or may not be conjugated to a chemical probe
RTCLSQLLDIMKS

SEQ ID NO: 810 - protein, 10 aa, Homo sapiens
  Table 2 sequence identifier: P49588_C773
  MOD_RES (2)..(2): May or may not be conjugated to a chemical probe
KCLSVMEAKV

SEQ ID NO: 811 - protein, 19 aa, Homo sapiens
  Table 2 sequence identifier: Q96RN5_C618
  MOD_RES (6)..(6): May or may not be conjugated to a chemical probe
KQQYLCQPLLDAVLANIRS

SEQ ID NO: 812 - protein, 37 aa, Homo sapiens; identical to SEQ ID NO: 95
  Table 2 sequence identifier: O15294_C758
  MOD_RES (2)..(2): May or may not be conjugated to a chemical probe

SEQ ID NO: 813 - protein, 18 aa, Homo sapiens
  Table 2 sequence identifier: P46734_C207
  MOD_RES (3)..(3): May or may not be conjugated to a chemical probe
KMCDFGISGYLVDSVAKT

SEQ ID NO: 814 - protein, 23 aa, Homo sapiens
  Table 2 sequence identifier: Q96S55_C272
  MOD_RES (20)..(20): May or may not be conjugated to a chemical probe
RSLLETNEIPSLILWGPPGCGKT

SEQ ID NO: 815 - protein, 25 aa, Homo sapiens
  Table 2 sequence identifier: O95229_C54
  MOD_RES (4)..(4): May or may not be conjugated to a chemical probe
KLLCSQLQVADFLQNILAQEDTAKG

SEQ ID NO: 816 - protein, 17 aa, Homo sapiens
  Table 2 sequence identifier: O60610_C1227
  MOD_RES (4)..(4): May or may not be conjugated to a chemical probe
KAGCAVTSLLASELTKD

SEQ ID NO: 817 - protein, 26 aa, Homo sapiens
  Table 2 sequence identifier: Q13428_C38
  MOD_RES (2)..(2): May or may not be conjugated to a chemical probe
KCFLAQPVTLLDIYTHWQQTSELGRK

SEQ ID NO: 818 - protein, 13 aa, Homo sapiens
  Table 2 sequence identifier: Q9Y277_C65
  MOD_RES (3)..(3): May or may not be conjugated to a chemical probe
KVCNYGLTFTQKW

SEQ ID NO: 819 - protein, 26 aa, Homo sapiens
  Table 2 sequence identifier: P57764_C268
  MOD_RES (2)..(2): May or may not be conjugated to a chemical probe
RCLHNFLTDGVPAEGAFTEDFQGLRA

SEQ ID NO: 820 - protein, 16 aa, Homo sapiens
  Table 2 sequence identifier: Q9Y3A3_C134
  MOD_RES (9)..(9): May or may not be conjugated to a chemical probe
RHTLDGAACLLNSNKY

SEQ ID NO: 821 - protein, 16 aa, Homo sapiens
  Table 2 sequence identifier: Q02252_C317
  MOD_RES (2)..(2): May or may not be conjugated to a chemical probe
RCMALSTAVLVGEAKK

SEQ ID NO: 822 - protein, 38 aa, Homo sapiens; identical to SEQ ID NO: 121
  Table 2 sequence identifier: Q9NYL9_C132
  MOD_RES (21)..(21): May or may not be conjugated to a chemical probe

SEQ ID NO: 823 - protein, 12 aa, Homo sapiens
  Table 2 sequence identifier: P83731_C6
  MOD_RES (5)..(5): May or may not be conjugated to a chemical probe
KVELCSFSGYKI

SEQ ID NO: 824 - protein, 11 aa, Homo sapiens
  Table 2 sequence identifier: O95336_C32
  MOD_RES (4)..(4): May or may not be conjugated to a chemical probe
RAACCLAGARA

SEQ ID NO: 825 - protein, 38 aa, Homo sapiens; identical to SEQ ID NO: 74
  Table 2 sequence identifier: Q13155_C291
  MOD_RES (27)..(27): May or may not be conjugated to a chemical probe

SEQ ID NO: 826 - protein, 10 aa, Homo sapiens
  Table 2 sequence identifier: Q13418_C346
  MOD_RES (6)..(6): May or may not be conjugated to a chemical probe
KFSFQCPGRM

SEQ ID NO: 827 - protein, 20 aa, Homo sapiens
  Table 2 sequence identifier: A6NDU8_C179
  MOD_RES (2)..(2): May or may not be conjugated to a chemical probe
RCPIQLNEGVSFQDLDTAKL

SEQ ID NO: 828 - protein, 26 aa, Homo sapiens
  Table 2 sequence identifier: Q9UKF6_C498
  MOD_RES (11)..(11): May or may not be conjugated to a chemical probe
RNFNYHILSPCDLSNYTDLAMSTVKQ

SEQ ID NO: 829 - protein, 25 aa, Homo sapiens
  Table 2 sequence identifier: Q96F86_C413
  MOD_RES (17)..(17): May or may not be conjugated to a chemical probe
KDLPTSPVDLVINCLDCPENVFLRD

SEQ ID NO: 830 - protein, 14 aa, Homo sapiens
  Table 2 sequence identifier: P42224_C492
  MOD_RES (11)..(11): May or may not be conjugated to a chemical probe
RNLSFFLTPPCARW

SEQ ID NO: 831 - protein, 11 aa, Homo sapiens
  Table 2 sequence identifier: P11216_C326
  MOD_RES (3)..(3): May or may not be conjugated to a chemical probe
RTCFETFPDKV

SEQ ID NO: 832 - protein, 18 aa, Homo sapiens
  Table 2 sequence identifier: P21980_C277
  MOD_RES (5)..(5): May or may not be conjugated to a chemical probe
KYGQCWVFAAVACTVLRC

SEQ ID NO: 833 - protein, 20 aa, Homo sapiens
  Table 2 sequence identifier: Q9HAV7_C124
  MOD_RES (5)..(5): May or may not be conjugated to a chemical probe
KATQCVPKEEIKDDNPHLKN

SEQ ID NO: 834 - protein, 9 aa, Homo sapiens
  Table 2 sequence identifier: P24752_C126
  MOD_RES (3)..(3): May or may not be conjugated to a chemical probe
KVCASGMKA

SEQ ID NO: 835 - protein, 31 aa, Homo sapiens; identical to SEQ ID NO: 108
  Table 2 sequence identifier: Q9NQ88_C161
  MOD_RES (17)..(17): May or may not be conjugated to a chemical probe

SEQ ID NO: 836 - protein, 11 aa, Homo sapiens
  Table 2 sequence identifier: Q13155_C23
  MOD_RES (7)..(7): May or may not be conjugated to a chemical probe
RVELPTCMYRL

SEQ ID NO: 837 - protein, 13 aa, Homo sapiens
  Table 2 sequence identifier: Q9NQW6_C712
  MOD_RES (7)..(7): May or may not be conjugated to a chemical probe
KNNAFPCQVNIKQ

SEQ ID NO: 838 - protein, 18 aa, Homo sapiens
  Table 2 sequence identifier: P51649_C340
  MOD_RES (7)..(7): May or may not be conjugated to a chemical probe
RNTGQTCVCSNQFLVQRG

SEQ ID NO: 839 - protein, 20 aa, Homo sapiens
  Table 2 sequence identifier: Q15021_C439
  MOD_RES (18)..(18): May or may not be conjugated to a chemical probe
KNAIQLLASFLANNPFSCKL

SEQ ID NO: 840 - protein, 23 aa, Homo sapiens
  Table 2 sequence identifier: Q5T0N5_C69
  MOD_RES (5)..(5): May or may not be conjugated to a chemical probe
RFTSCVAFFNILNELNDYAGQRE

SEQ ID NO: 841 - protein, 9 aa, Homo sapiens
  Table 2 sequence identifier: P38606_C138
  MOD_RES (7)..(7): May or may not be conjugated to a chemical probe
KWDFTPCKN

SEQ ID NO: 842 - protein, 32 aa, Homo sapiens; identical to SEQ ID NO: 354
  Table 2 sequence identifier: Q9HCC0_C216
  MOD_RES (13)..(13): May or may not be conjugated to a chemical probe

SEQ ID NO: 843 - protein, 16 aa, Homo sapiens
  Table 2 sequence identifier: Q9NQC3_C1101
  MOD_RES (12)..(12): May or may not be conjugated to a chemical probe
KYSNSALGHVNCTIKE

SEQ ID NO: 844 - protein, 15 aa, Homo sapiens
  Table 2 sequence identifier: P35754_C23
  MOD_RES (10)..(10): May or may not be conjugated to a chemical probe
KVVVFIKPTCPYCRR

SEQ ID NO: 845 - protein, 23 aa, Homo sapiens
  Table 2 sequence identifier: Q99757_C90
  MOD_RES (18)..(18): May or may not be conjugated to a chemical probe
RVVNSETPVVVDFHAQWCGPCKI

SEQ ID NO: 846 - protein, 34 aa, Homo sapiens; identical to SEQ ID NO: 170
  Table 2 sequence identifier: Q9Y3D0_C93
  MOD_RES (22)..(22): May or may not be conjugated to a chemical probe

SEQ ID NO: 847 - protein, 18 aa, Homo sapiens
  Table 2 sequence identifier: Q9UMS0_C213
  MOD_RES (9)..(9): May or may not be conjugated to a chemical probe
KLQGSCTSCPSSIITLKN

SEQ ID NO: 848 - protein, 12 aa, Homo sapiens
  Table 2 sequence identifier: Q9NXV6_C516
  MOD_RES (9)..(9): May or may not be conjugated to a chemical probe
KSVYLGTGCGKS

SEQ ID NO: 849 - protein, 13 aa, Homo sapiens
  Table 2 sequence identifier: Q96RS6_C376
  MOD_RES (6)..(6): May or may not be conjugated to a chemical probe
RDSAQCAAIAERL

SEQ ID NO: 850 - protein, 23 aa, Homo sapiens
  Table 2 sequence identifier: Q14997_C1840
  MOD_RES (20)..(20): May or may not be conjugated to a chemical probe
KQQFTDDQLLVLTDLLVSPCYYA

SEQ ID NO: 851 - protein, 31 aa, Homo sapiens; identical to SEQ ID NO: 64
  Table 2 sequence identifier: P50570_C27
  MOD_RES (13)..(13): May or may not be conjugated to a chemical probe

SEQ ID NO: 852 - protein, 17 aa, Homo sapiens
  Table 2 sequence identifier: Q86YH6_C71
  MOD_RES (2)..(2): May or may not be conjugated to a chemical probe
RCLLSDELSNIAMQVRK

SEQ ID NO: 853 - protein, 25 aa, Homo sapiens
  Table 2 sequence identifier: Q99497_C106
  MOD_RES (8)..(8): May or may not be conjugated to a chemical probe
KGLIAAICAGPTALLAHEIGFGSKV

SEQ ID NO: 854 - protein, 19 aa, Homo sapiens
  Table 2 sequence identifier: Q9UJW0_C258
  MOD_RES (11)..(11): May or may not be conjugated to a chemical probe
RLLQPDFQPVCASQLYPRH

SEQ ID NO: 855 - protein, 14 aa, Homo sapiens
  Table 2 sequence identifier: Q9BUH6_C180
  MOD_RES (2)..(2): May or may not be conjugated to a chemical probe
RCPGESLINPGFKS

SEQ ID NO: 856 - protein, 14 aa, Homo sapiens
  Table 2 sequence identifier: P24752_C196
  MOD_RES (7)..(7): May or may not be conjugated to a chemical probe
KIHMGSCAENTAKK

SEQ ID NO: 857 - protein, 21 aa, Homo sapiens
  Table 2 sequence identifier: Q13162_C51
  MOD_RES (5)..(5): May or may not be conjugated to a chemical probe
REEECHFYAGGQVYPGEASRV

SEQ ID NO: 858 - protein, 21 aa, Homo sapiens
  Table 2 sequence identifier: Q9BTA9_C553
  MOD_RES (4)..(4): May or may not be conjugated to a chemical probe
RSTCSLTPALAAHFSENLIKH

SEQ ID NO: 859 - protein, 16 aa, Homo sapiens
  Table 2 sequence identifier: P48643_C253
  MOD_RES (7)..(7): May or may not be conjugated to a chemical probe
KIAILTCPFEPPKPKT

SEQ ID NO: 860 - protein, 21 aa, Homo sapiens
  Table 2 sequence identifier: O75362_C286
  MOD_RES (2)..(2): May or may not be conjugated to a chemical probe
RCIPQLDPFTTFQAWQLATKG

SEQ ID NO: 861 - protein, 24 aa, Homo sapiens
  Table 2 sequence identifier: O60825_C158
  MOD_RES (9)..(9): May or may not be conjugated to a chemical probe
KVFFVESVCDDPDVIAANILEVKV

SEQ ID NO: 862 - protein, 12 aa, Homo sapiens
  Table 2 sequence identifier: Q8NBS9_C350
  MOD_RES (7)..(7): May or may not be conjugated to a chemical probe
KFYAPWCGHCKT

SEQ ID NO: 863 - protein, 22 aa, Homo sapiens
  Table 2 sequence identifier: Q9NYL2_C22
  MOD_RES (11)..(11): May or may not be conjugated to a chemical probe
KFDDLQFFENCGGGSFGSVYRA

SEQ ID NO: 864 - protein, 15 aa, Homo sapiens
  Table 2 sequence identifier: P27707_C9
  MOD_RES (3)..(3): May or may not be conjugated to a chemical probe
RSCPSFSASSEGTRI

SEQ ID NO: 865 - protein, 24 aa, Homo sapiens
  Table 2 sequence identifier: Q93009_C223
  MOD_RES (7)..(7): May or may not be conjugated to a chemical probe
KNQGATCYMNSLLQTLFFTNQLRK

SEQ ID NO: 866 - protein, 18 aa, Homo sapiens
  Table 2 sequence identifier: O14929_C101
  MOD_RES (8)..(8): May or may not be conjugated to a chemical probe
KVDENFDCVEADDVEGKI

SEQ ID NO: 867 - protein, 18 aa, Homo sapiens
  Table 2 sequence identifier: Q9UPQ0_C140
  MOD_RES (6)..(6): May or may not be conjugated to a chemical probe
KAANSCTSYSGTTLNLKE

SEQ ID NO: 868 - protein, 18 aa, Homo sapiens
  Table 2 sequence identifier: Q96NY7_C487
  MOD_RES (12)..(12): May or may not be conjugated to a chemical probe
RAGYDGESIGNCPFSQRL

SEQ ID NO: 869 - protein, 20 aa, Homo sapiens
  Table 2 sequence identifier: Q9NQ88_C114
  MOD_RES (4)..(4): May or may not be conjugated to a chemical probe
REECPVFTPPGGETLDQVKM

SEQ ID NO: 870 - protein, 16 aa, Homo sapiens
  Table 2 sequence identifier: Q14790_C360
  MOD_RES (8)..(8): May or may not be conjugated to a chemical probe
KVFFIQACQGDNYQKG

SEQ ID NO: 871 - protein, 15 aa, Homo sapiens
  Table 2 sequence identifier: P04183_C230
  MOD_RES (11)..(11): May or may not be conjugated to a chemical probe
KLFAPQQILQCSPAN

SEQ ID NO: 872 - protein, 22 aa, Homo sapiens
  Table 2 sequence identifier: P68366_C54
  MOD_RES (15)..(15): May or may not be conjugated to a chemical probe
KTIGGGDDSFTTFFCETGAGKH

SEQ ID NO: 873 - protein, 40 aa, Homo sapiens
  Table 2 sequence identifier: Q13428_C1298
  MOD_RES (20)..(20): May or may not be conjugated to a chemical probe
KGAGNPQASTLALQSNITQCLLGQPWPLNEAQVQASVVKV

SEQ ID NO: 874 - protein, 13 aa, Homo sapiens
  Table 2 sequence identifier: Q5MNZ6_C63
  MOD_RES (2)..(2): May or may not be conjugated to a chemical probe
RCNYLALVGGGKK

SEQ ID NO: 875 - protein, 11 aa, Homo sapiens
  Table 2 sequence identifier: O14980_C528
  MOD_RES (7)..(7): May or may not be conjugated to a chemical probe
KDLLGLCEQKR

SEQ ID NO: 876 - protein, 17 aa, Homo sapiens
  Table 2 sequence identifier: Q86W42_C35
  MOD_RES (14)..(14): May or may not be conjugated to a chemical probe
RLHMTIFSQSVSPCGKF

SEQ ID NO: 877 - protein, 55 aa, Homo sapiens; identical to SEQ ID NO: 98
  Table 2 sequence identifier: Q9Y6G9_C51
  MOD_RES (46)..(46): May or may not be conjugated to a chemical probe

SEQ ID NO: 878 - protein, 17 aa, Homo sapiens
  Table 2 sequence identifier: Q9NY27_C22
  MOD_RES (4)..(4): May or may not be conjugated to a chemical probe
KEVCPVLDQFLCHVAKT

SEQ ID NO: 879 - protein, 17 aa, Homo sapiens
  Table 2 sequence identifier: Q8NFH5_C255
  MOD_RES (2)..(2): May or may not be conjugated to a chemical probe
RCALSSPSLAFTPPIKT

SEQ ID NO: 880 - protein, 26 aa, Homo sapiens
  Table 2 sequence identifier: Q9Y676_C128
  MOD_RES (8)..(8): May or may not be conjugated to a chemical probe
KLLEQFVCAHTGIIFYAPYTGVCVKQ

SEQ ID NO: 881 - protein, 14 aa, Homo sapiens
  Table 2 sequence identifier: P35658_C728
  MOD_RES (3)..(3): May or may not be conjugated to a chemical probe
KACFQVGTSEEMKM

SEQ ID NO: 882 - protein, 23 aa, Homo sapiens
  Table 2 sequence identifier: Q9NTX5_C133
  MOD_RES (13)..(13): May or may not be conjugated to a chemical probe
KSLGTPEDGMAVCMFMQNTLTRF

SEQ ID NO: 883 - protein, 15 aa, Homo sapiens
  Table 2 sequence identifier: Q15118_C71
  MOD_RES (12)..(12): May or may not be conjugated to a chemical probe
KQFLDFGSVNACEKT

SEQ ID NO: 884 - protein, 11 aa, Homo sapiens
  Table 2 sequence identifier: Q00765_C18
  MOD_RES (3)..(3): May or may not be conjugated to a chemical probe
KNCMTDLLAKL

SEQ ID NO: 885 - protein, 31 aa, Homo sapiens
  Table 2 sequence identifier: P22307_C71
  MOD_RES (27)..(27): May or may not be conjugated to a chemical probe
KALADAQIPYSAVDQACVGYVFGDSTCGQRA

SEQ ID NO: 886 - protein, 26 aa, Homo sapiens
  Table 2 sequence identifier: O75521_C312
  MOD_RES (9)..(9): May or may not be conjugated to a chemical probe
KKLTAGEACAQGLVTEVFPDSTFQKE

SEQ ID NO: 887 - protein, 21 aa, Homo sapiens
  Table 2 sequence identifier: P49189_C288
  MOD_RES (15)..(15): May or may not be conjugated to a chemical probe
KGALMANFLTQGQVCCNGTRV

SEQ ID NO: 888 - protein, 22 aa, Homo sapiens
  Table 2 sequence identifier: Q5T440_C170
  MOD_RES (13)..(13): May or may not be conjugated to a chemical probe
RVWAVLPSSPEACGAASLQERA

SEQ ID NO: 889 - protein, 36 aa, Homo sapiens; identical to SEQ ID NO: 87
  Table 2 sequence identifier: Q15084_C190
  MOD_RES (31)..(31): May or may not be conjugated to a chemical probe

SEQ ID NO: 890 - protein, 19 aa, Homo sapiens
  Table 2 sequence identifier: Q96C19_C172
  MOD_RES (14)..(14): May or may not be conjugated to a chemical probe
KAAAGELQEDSGLCVLARL

SEQ ID NO: 891 - protein, 9 aa, Homo sapiens
  Table 2 sequence identifier: P22061_C102
  MOD_RES (5)..(5): May or may not be conjugated to a chemical probe
RMVGCTGKV

SEQ ID NO: 892 - protein, 21 aa, Homo sapiens
  Table 2 sequence identifier: Q9NP73_C86
  MOD_RES (14)..(14): May or may not be conjugated to a chemical probe
KADLVISHAGAGSCLETLEKG

SEQ ID NO: 893 - protein, 21 aa, Homo sapiens
  Table 2 sequence identifier: Q9BRF8_C54
  MOD_RES (8)..(8): May or may not be conjugated to a chemical probe
KAWSTGDCDNGGDEWEQEIRL

SEQ ID NO: 894 - protein, 27 aa, Homo sapiens
  Table 2 sequence identifier: Q6ICB0_C108
  MOD_RES (12)..(12): May or may not be conjugated to a chemical probe
RGEAYNLFEHNCNTFSNEVAQFLTGRK

SEQ ID NO: 895 - protein, 14 aa, Homo sapiens
  Table 2 sequence identifier: P29590_C389
  MOD_RES (8)..(8): May or may not be conjugated to a chemical probe
RLQDLSSCITQGKD

SEQ ID NO: 896 - protein, 13 aa, Homo sapiens
  Table 2 sequence identifier: P07858_C211
  MOD_RES (3)..(3): May or may not be conjugated to a chemical probe
KICEPGYSPTYKQ

SEQ ID NO: 897 - protein, 16 aa, Homo sapiens
  Table 2 sequence identifier: Q9NX18_C83
  MOD_RES (7)..(7): May or may not be conjugated to a chemical probe
RGMLENCILLSLFAKE

SEQ ID NO: 898 - protein, 10 aa, Homo sapiens
  Table 2 sequence identifier: P46109_C249
  MOD_RES (5)..(5): May or may not be conjugated to a chemical probe
KRVPCAYDKT

SEQ ID NO: 899 - protein, 17 aa, Homo sapiens
  Table 2 sequence identifier: P45984_C177
  MOD_RES (4)..(4): May or may not be conjugated to a chemical probe
RTACTNFMMTPYVVTRY

SEQ ID NO: 900 - protein, 14 aa, Homo sapiens
  Table 2 sequence identifier: P19447_C342
  MOD_RES (9)..(9): May or may not be conjugated to a chemical probe
RSGVIVLPCGAGKS

SEQ ID NO: 901 - protein, 12 aa, Homo sapiens
  Table 2 sequence identifier: P42166_C341
  MOD_RES (8)..(8): May or may not be conjugated to a chemical probe
KSGIQPLCPERS

SEQ ID NO: 902 - protein, 22 aa, Homo sapiens
  Table 2 sequence identifier: Q8N1F7_C522
  MOD_RES (19)..(19): May or may not be conjugated to a chemical probe
KSSGQSAQLLSHEPGDPPCLRR

SEQ ID NO: 903 - protein, 11 aa, Homo sapiens
  Table 2 sequence identifier: Q86UY8_C276
  MOD_RES (4)..(4): May or may not be conjugated to a chemical probe
KYICYAEQTRA

SEQ ID NO: 904 - protein, 14 aa, Homo sapiens
  Table 2 sequence identifier: Q8WWI1_C228
  MOD_RES (10)..(10): May or may not be conjugated to a chemical probe
RDSGYGDIWCPERG

SEQ ID NO: 905 - protein, 11 aa, Homo sapiens
  Table 2 sequence identifier: Q9NWA0_C139
  MOD_RES (4)..(4): May or may not be conjugated to a chemical probe
KSLCMFEIPKE

SEQ ID NO: 906 - protein, 22 aa, Homo sapiens
  Table 2 sequence identifier: P09110_C381
  MOD_RES (17)..(17): May or may not be conjugated to a chemical probe
KVNPLGGAVALGHPLGCTGARQ

SEQ ID NO: 907 - protein, 24 aa, Homo sapiens
  Table 2 sequence identifier: Q2NL82_C126
  MOD_RES (21)..(21): May or may not be conjugated to a chemical probe
RDTGTVHLNELGNTQNFMLLCPRL

SEQ ID NO: 908 - protein, 24 aa, Homo sapiens
  Table 2 sequence identifier: Q5JPI3_C308
  MOD_RES (17)..(17): May or may not be conjugated to a chemical probe
KFEQSDLEAFYNVITVCGTNEVRH

SEQ ID NO: 909 - protein, 9 aa, Homo sapiens
  Table 2 sequence identifier: P23919_C163
  MOD_RES (2)..(2): May or may not be conjugated to a chemical probe
RCFHQLMKD

SEQ ID NO: 910 - protein, 14 aa, Homo sapiens
  Table 2 sequence identifier: Q96EB1_C218
  MOD_RES (5)..(5): May or may not be conjugated to a chemical probe
KVEPCSLTPGYTKL

SEQ ID NO: 911 - protein, 15 aa, Homo sapiens
  Table 2 sequence identifier: Q96FX7_C209
  MOD_RES (8)..(8): May or may not be conjugated to a chemical probe
RFCSFSPCIEQVQRT

SEQ ID NO: 912 - protein, 29 aa, Homo sapiens
  Table 2 sequence identifier: O14933_C98
  MOD_RES (26)..(26): May or may not be conjugated to a chemical probe
KIYHPNVDENGQICLPIISSENWKPCTKT

SEQ ID NO: 913 - protein, 23 aa, Homo sapiens
  Table 2 sequence identifier: Q29RF7_C242
  MOD_RES (9)..(9): May or may not be conjugated to a chemical probe
RTVQTIEACIANFFNQVLVLGRS

SEQ ID NO: 914 - protein, 13 aa, Homo sapiens
  Table 2 sequence identifier: Q96T76_C819
  MOD_RES (8)..(8): May or may not be conjugated to a chemical probe
RYHPLSSCLTARL

SEQ ID NO: 915 - protein, 11 aa, Homo sapiens
  Table 2 sequence identifier: P23919_C117
  MOD_RES (9)..(9): May or may not be conjugated to a chemical probe
KENFSLDWCKQ

SEQ ID NO: 916 - protein, 8 aa, Homo sapiens
  Table 2 sequence identifier: Q15149_C4574
  MOD_RES (5)..(5): May or may not be conjugated to a chemical probe
KYLTCPKT

SEQ ID NO: 917 - protein, 26 aa, Homo sapiens
  Table 2 sequence identifier: Q96RP9_C153
  MOD_RES (18)..(18): May or may not be conjugated to a chemical probe
RVLDGAVLVLCAVGGVQCQTMTVNRQ

SEQ ID NO: 918 - protein, 32 aa, Homo sapiens; identical to SEQ ID NO: 397
  Table 2 sequence identifier: P04818_C199
  MOD_RES (15)..(15): May or may not be conjugated to a chemical probe

SEQ ID NO: 919 - protein, 30 aa, Homo sapiens; identical to SEQ ID NO: 182
  Table 2 sequence identifier: P27708_C73
  MOD_RES (28)..(28): May or may not be conjugated to a chemical probe

SEQ ID NO: 920 - protein, 8 aa, Homo sapiens
  Table 2 sequence identifier: P55265_C1224
  MOD_RES (6)..(6): May or may not be conjugated to a chemical probe
KNFYLCPV

SEQ ID NO: 921 - protein, 30 aa, Homo sapiens; identical to SEQ ID NO: 394
  Table 2 sequence identifier: Q9Y3D2_C105
  MOD_RES (3)..(3): May or may not be conjugated to a chemical probe

SEQ ID NO: 922 - protein, 20 aa, Homo sapiens
  Table 2 sequence identifier: O00244_C12
  MOD_RES (10)..(10): May or may not be conjugated to a chemical probe
KHEFSVDMTCGGCAEAVSRV

SEQ ID NO: 923 - protein, 18 aa, Homo sapiens
  Table 2 sequence identifier: Q8WV74_C207
  MOD_RES (7)..(7): May or may not be conjugated to a chemical probe
RLAGLTCSGAEGLARPKQ

SEQ ID NO: 924 - protein, 16 aa, Homo sapiens
  Table 2 sequence identifier: Q9NRW3_C130
  MOD_RES (9)..(9): May or may not be conjugated to a chemical probe
RLYYFQYPCYQEGLRS

SEQ ID NO: 925 - protein, 26 aa, Homo sapiens
  Table 2 sequence identifier: P24468_C326
  MOD_RES (11)..(11): May or may not be conjugated to a chemical probe
KAIVLFTSDACGLSDVAHVESLQEKS

SEQ ID NO: 926 - protein, 13 aa, Homo sapiens
  Table 2 sequence identifier: P42166_C684
  MOD_RES (11)..(11): May or may not be conjugated to a chemical probe
KGGTLFGGEVCKV

SEQ ID NO: 927 - protein, 18 aa, Homo sapiens
  Table 2 sequence identifier: Q96EY5_C231
  MOD_RES (3)..(3): May or may not be conjugated to a chemical probe
KSCSPLAFSAFGDLTIKS

SEQ ID NO: 928 - protein, 11 aa, Homo sapiens
  Table 2 sequence identifier: P14635_C238
  MOD_RES (7)..(7): May or may not be conjugated to a chemical probe
RFMQNNCVPKK

SEQ ID NO: 929 - protein, 38 aa, Homo sapiens
  Table 2 sequence identifier: Q8NDH3_C81
  MOD_RES (36)..(36): May or may not be conjugated to a chemical probe
RVTEELWQAALSTLNPNPTDSCPLYLNYATVAALPCRV

SEQ ID NO: 930 - protein, 24 aa, Homo sapiens
  Table 2 sequence identifier: Q9P0J1_C149
  MOD_RES (14)..(14): May or may not be conjugated to a chemical probe
RGMLLGVFDGHAGCACSQAVSERL

SEQ ID NO: 931 - protein, 17 aa, Homo sapiens
  Table 2 sequence identifier: Q96P48_C900
  MOD_RES (9)..(9): May or may not be conjugated to a chemical probe
RAVFPEGPCEEPLQLRK

SEQ ID NO: 932 - protein, 23 aa, Homo sapiens
  Table 2 sequence identifier: Q96HE7_C37
  MOD_RES (4)..(4): May or may not be conjugated to a chemical probe
RCFCQVSGYLDDCTCDVETIDRF

SEQ ID NO: 933 - protein, 26 aa, Homo sapiens
  Table 2 sequence identifier: Q07065_C100
  MOD_RES (23)..(23): May or may not be conjugated to a chemical probe
KSSSSSSASAAAAAAAASSSASCSRR

SEQ ID NO: 934 - protein, 12 aa, Homo sapiens
  Table 2 sequence identifier: Q9BRJ7_C88
  MOD_RES (9)..(9): May or may not be conjugated to a chemical probe
RVLGLGLGCLRL

SEQ ID NO: 935 - protein, 13 aa, Homo sapiens
  Table 2 sequence identifier: O75439_C265
  MOD_RES (9)..(9): May or may not be conjugated to a chemical probe
KFHFGDSLCTHKG

SEQ ID NO: 936 - protein, 18 aa, Homo sapiens
  Table 2 sequence identifier: O43175_C369
  MOD_RES (6)..(6): May or may not be conjugated to a chemical probe
KNAGNCLSPAVIVGLLKE

SEQ ID NO: 937 - protein, 33 aa, Homo sapiens; identical to SEQ ID NO: 232
  Table 2 sequence identifier: Q9UNI6_C265
  MOD_RES (5)..(5): May or may not be conjugated to a chemical probe

SEQ ID NO: 938 - protein, 19 aa, Homo sapiens
  Table 2 sequence identifier: Q06203_C100
  MOD_RES (2)..(2): May or may not be conjugated to a chemical probe
KCELENCQPFVVETLHGKI

SEQ ID NO: 939 - protein, 17 aa, Homo sapiens
  Table 2 sequence identifier: A0AVT1_C347
  MOD_RES (7)..(7): May or may not be conjugated to a chemical probe
RKPNVGCQQDSEELLKL

SEQ ID NO: 940 - protein, 12 aa, Homo sapiens
  Table 2 sequence identifier: Q86X76_C203
  MOD_RES (7)..(7): May or may not be conjugated to a chemical probe
KIGLAVCYDMRF

SEQ ID NO: 941 - protein, 16 aa, Homo sapiens
  Table 2 sequence identifier: Q6XZF7_C691
  MOD_RES (9)..(9): May or may not be conjugated to a chemical probe
RSLDQTSPCPLVLVRI

SEQ ID NO: 942 - protein, 19 aa, Homo sapiens
  Table 2 sequence identifier: Q15398_C129
  MOD_RES (8)..(8): May or may not be conjugated to a chemical probe
RYRPDMPCFLLSNQNAVKA

SEQ ID NO: 943 - protein, 9 aa, Homo sapiens
  Table 2 sequence identifier: O75717_C773
  MOD_RES (7)..(7): May or may not be conjugated to a chemical probe
KMLALSCKL

SEQ ID NO: 944 - protein, 12 aa, Homo sapiens
  Table 2 sequence identifier: Q01433_C107
  MOD_RES (9)..(9): May or may not be conjugated to a chemical probe
RSLPGPAPCLKH

SEQ ID NO: 945 - protein, 28 aa, Homo sapiens
  Table 2 sequence identifier: Q8WVV9_C464
  MOD_RES (19)..(19): May or may not be conjugated to a chemical probe
KNIIQPPSCVLHYYNVPLCVTEETFTKL

SEQ ID NO: 946 - protein, 26 aa, Homo sapiens
  Table 2 sequence identifier: O14733_C131
  MOD_RES (20)..(20): May or may not be conjugated to a chemical probe
RYQAEINDLENLGEMGSGTCGQVWKM

SEQ ID NO: 947 - protein, 16 aa, Homo sapiens
  Table 2 sequence identifier: Q14137_C404
  MOD_RES (9)..(9): May or may not be conjugated to a chemical probe
RDLQPFPTCQALVYRG

SEQ ID NO: 948 - protein, 24 aa, Homo sapiens
  Table 2 sequence identifier: Q96RU2_C171
  MOD_RES (7)..(7): May or may not be conjugated to a chemical probe
KNVGNTCWFSAVIQSLFQLPEFRR

SEQ ID NO: 949 - protein, 27 aa, Homo sapiens
  Table 2 sequence identifier: Q9Y679_C391
  MOD_RES (4)..(4): May or may not be conjugated to a chemical probe
KTGCVDLTITNLLEGAVAFMPEDITKG

SEQ ID NO: 950 - protein, 11 aa, Homo sapiens
  Table 2 sequence identifier: P51610_C1872
  MOD_RES (8)..(8): May or may not be conjugated to a chemical probe
RVAGINACGRG

SEQ ID NO: 951 - protein, 44 aa, Homo sapiens; identical to SEQ ID NO: 532
  Table 2 sequence identifier: P22307_C307
  MOD_RES (17)..(17): May or may not be conjugated to a chemical probe

SEQ ID NO: 952 - protein, 16 aa, Homo sapiens
  Table 2 sequence identifier: Q9BTE3_C325
  MOD_RES (12)..(12): May or may not be conjugated to a chemical probe
KLQHINPLLPACLNKE

SEQ ID NO: 953 - protein, 16 aa, Homo sapiens
  Table 2 sequence identifier: Q9HA64_C24
  MOD_RES (10)..(10): May or may not be conjugated to a chemical probe
RATGHSGGGCISQGRS

SEQ ID NO: 954 - protein, 13 aa, Homo sapiens
  Table 2 sequence identifier: Q5TFE4_C119
  MOD_RES (11)..(11): May or may not be conjugated to a chemical probe
KHFLSDTGMACRS

SEQ ID NO: 955 - protein, 11 aa, Homo sapiens
  Table 2 sequence identifier: Q96N67_C2125
  MOD_RES (8)..(8): May or may not be conjugated to a chemical probe
KAVLPVTCHRD

SEQ ID NO: 956 - protein, 21 aa, Homo sapiens
  Table 2 sequence identifier: P52948_C1312
  MOD_RES (5)..(5): May or may not be conjugated to a chemical probe
RWLSCTATPQIEEEVSLTQKN

SEQ ID NO: 957 - protein, 37 aa, Homo sapiens; identical to SEQ ID NO: 598
  Table 2 sequence identifier: Q5UIP0_C2298
  MOD_RES (18)..(18): May or may not be conjugated to a chemical probe

SEQ ID NO: 958 - protein, 14 aa, Homo sapiens
  Table 2 sequence identifier: P51812_C436
  MOD_RES (12)..(12): May or may not be conjugated to a chemical probe
KEDIGVGSYSVCKR

SEQ ID NO: 959 - protein, 29 aa, Homo sapiens
  Table 2 sequence identifier: Q92616_C1692
  MOD_RES (7)..(7): May or may not be conjugated to a chemical probe
KGMGESCFEDLLPWLMETLTYEQSSVDRS

SEQ ID NO: 960 - protein, 11 aa, Homo sapiens
  Table 2 sequence identifier: Q15345_C297
  MOD_RES (2)..(2): May or may not be conjugated to a chemical probe
RCAAALMASRR

SEQ ID NO: 961 - protein, 35 aa, Homo sapiens; identical to SEQ ID NO: 320
  Table 2 sequence identifier: Q9NPH0_C267
  MOD_RES (30)..(30): May or may not be conjugated to a chemical probe

SEQ ID NO: 962 - protein, 12 aa, Homo sapiens
  Table 2 sequence identifier: P04183_C66
  MOD_RES (7)..(7): May or may not be conjugated to a chemical probe
RYSSSFCTHDRN

SEQ ID NO: 963 - protein, 19 aa, Homo sapiens
  Table 2 sequence identifier: P42166_C629
  MOD_RES (10)..(10): May or may not be conjugated to a chemical probe
KTYDAASYICEAAFDEVKM

SEQ ID NO: 964 - protein, 23 aa, Homo sapiens
  Table 2 sequence identifier: Q15013_C124
  MOD_RES (2)..(2): May or may not be conjugated to a chemical probe
KCQQALAELESVLSHLEDFFART

SEQ ID NO: 965 - protein, 9 aa, Homo sapiens
  Table 2 sequence identifier: Q9Y5Y2_C72
  MOD_RES (6)..(6): May or may not be conjugated to a chemical probe
RAVHQCDRG

SEQ ID NO: 966 - protein, 37 aa, Homo sapiens
  Table 2 sequence identifier: O15446_C86
  MOD_RES (6)..(6): May or may not be conjugated to a chemical probe
RVLSSCPQAGEATLLAPSTEAGGGLTCASAPQGTLRI

SEQ ID NO: 967 - protein, 16 aa, Homo sapiens
  Table 2 sequence identifier: Q13630_C116
  MOD_RES (10)..(10): May or may not be conjugated to a chemical probe
RKVVSCLSTCIFPDKT

SEQ ID NO: 968 - protein, 19 aa, Homo sapiens
  Table 2 sequence identifier: Q8IYQ7_C324
  MOD_RES (16)..(16): May or may not be conjugated to a chemical probe
RLGEMIETAYGENFACSKI

SEQ ID NO: 969 - protein, 37 aa, Homo sapiens; identical to SEQ ID NO: 309
  Table 2 sequence identifier: P05091_C319
  MOD_RES (31)..(31): May or may not be conjugated to a chemical probe

SEQ ID NO: 970 - protein, 23 aa, Homo sapiens
  Table 2 sequence identifier: Q29RF7_C532
  MOD_RES (16)..(16): May or may not be conjugated to a chemical probe
RELLDLHKQPTSEANCSAMFGKL

SEQ ID NO: 971 - protein, 16 aa, Homo sapiens
  Table 2 sequence identifier: Q9Y570_C381
  MOD_RES (11)..(11): May or may not be conjugated to a chemical probe
RFAEPIGGFQCVFPGC

SEQ ID NO: 972 - protein, 16 aa, Homo sapiens
  Table 2 sequence identifier: Q14980_C961
  MOD_RES (4)..(4): May or may not be conjugated to a chemical probe
RQFCSTQAALQAMERE

SEQ ID NO: 973 - protein, 19 aa, Homo sapiens
  Table 2 sequence identifier: P53384_C235
  MOD_RES (16)..(16): May or may not be conjugated to a chemical probe
KLPIIGVVENMSGFICPKC

SEQ ID NO: 974 - protein, 21 aa, Homo sapiens
  Table 2 sequence identifier: Q15003_C418
  MOD_RES (4)..(4): May or may not be conjugated to a chemical probe
RTMCPLLSMKPGEYSYFSPRT

SEQ ID NO: 975 - protein, 22 aa, Homo sapiens
  Table 2 sequence identifier: P53634_C258
  MOD_RES (9)..(9): May or may not be conjugated to a chemical probe
RNQASCGSCYSFASMGMLEARI

SEQ ID NO: 976 - protein, 25 aa, Homo sapiens
  Table 2 sequence identifier: Q8NFF5_C499
  MOD_RES (10)..(10): May or may not be conjugated to a chemical probe
RTDPYSCSLCPFSPTDPGWPAFMRI

SEQ ID NO: 977 - protein, 8 aa, Homo sapiens
  Table 2 sequence identifier: Q9ULA0_C144
  MOD_RES (2)..(2): May or may not be conjugated to a chemical probe
KCPTSGRL

SEQ ID NO: 978 - protein, 33 aa, Homo sapiens; identical to SEQ ID NO: 550
  Table 2 sequence identifier: P22307_C94
  MOD_RES (21)..(21): May or may not be conjugated to a chemical probe

SEQ ID NO: 979 - protein, 21 aa, Homo sapiens
  Table 2 sequence identifier: O15294_C620
  MOD_RES (17)..(17): May or may not be conjugated to a chemical probe
KVMAEANHFIDLSQIPCNGKA

SEQ ID NO: 980 - protein, 21 aa, Homo sapiens
  Table 2 sequence identifier: Q9Y5S2_C1517
  MOD_RES (16)..(16): May or may not be conjugated to a chemical probe
RIRPLNSEGTLNLLNCEPPRL

SEQ ID NO: 981 - protein, 10 aa, Homo sapiens
  Table 2 sequence identifier: Q8TD19_C623
  MOD_RES (7)..(7): May or may not be conjugated to a chemical probe
RLLTFGCNKC

SEQ ID NO: 982 - protein, 11 aa, Homo sapiens
  Table 2 sequence identifier: Q8N2W9_C326
  MOD_RES (6)..(6): May or may not be conjugated to a chemical probe
RVSLICPLVKM

SEQ ID NO: 983 - protein, 34 aa, Homo sapiens
  Table 2 sequence identifier: Q13158_C98
  MOD_RES (21)..(21): May or may not be conjugated to a chemical probe
RVDDFEAGAAAGAAPGEEDLCAAFNVICDNVGKD

SEQ ID NO: 984 - protein, 11 aa, Homo sapiens
  Table 2 sequence identifier: Q9UKX7_C151
  MOD_RES (3)..(3): May or may not be conjugated to a chemical probe
KACVGNAYHKQ

SEQ ID NO: 985 - protein, 21 aa, Homo sapiens
  Table 2 sequence identifier: Q6PCB5_C280
  MOD_RES (7)..(7): May or may not be conjugated to a chemical probe
KSIQTICSGLLTDVEDQAAKG

SEQ ID NO: 986 - protein, 17 aa, Homo sapiens
  Table 2 sequence identifier: P10398_C597
  MOD_RES (10)..(10): May or may not be conjugated to a chemical probe
RTQADELPACLLSAARL

SEQ ID NO: 987 - protein, 13 aa, Homo sapiens
  Table 2 sequence identifier: Q9UL40_C68
  MOD_RES (4)..(4): May or may not be conjugated to a chemical probe
KNQCLFTNTQCKV

SEQ ID NO: 988 - protein, 16 aa, Homo sapiens
  Table 2 sequence identifier: P46013_C903
  MOD_RES (12)..(12): May or may not be conjugated to a chemical probe
KSEETNTEIVECILKR

SEQ ID NO: 989 - protein, 18 aa, Homo sapiens
  Table 2 sequence identifier: Q16667_C39
  MOD_RES (4)..(4): May or may not be conjugated to a chemical probe
RVNCSQFLGLCALPGCKF

SEQ ID NO: 990 - protein, 12 aa, Homo sapiens
  Table 2 sequence identifier: O75150_C890
  MOD_RES (6)..(6): May or may not be conjugated to a chemical probe
REIQPCLAESRA

SEQ ID NO: 991 - protein, 18 aa, Homo sapiens
  Table 2 sequence identifier: Q00610_C870
  MOD_RES (6)..(6): May or may not be conjugated to a chemical probe
RIHEGCEEPATHNALAKI

SEQ ID NO: 992 - protein, 27 aa, Homo sapiens
  Table 2 sequence identifier: Q9Y5T5_C205
  MOD_RES (10)..(10): May or may not be conjugated to a chemical probe
KGLSNLGNTCFFNAVMQNLSQTPVLRE

SEQ ID NO: 993 - protein, 9 aa, Homo sapiens
  Table 2 sequence identifier: O95881_C66
  MOD_RES (4)..(4): May or may not be conjugated to a chemical probe
KSWCGACKA

SEQ ID NO: 994 - protein, 15 aa, Homo sapiens
  Table 2 sequence identifier: Q7Z5K2_C160
  MOD_RES (12)..(12): May or may not be conjugated to a chemical probe
RIVEDDASISSCNKL

SEQ ID NO: 995 - protein, 10 aa, Homo sapiens
  Table 2 sequence identifier: P42166_C518
  MOD_RES (8)..(8): May or may not be conjugated to a chemical probe
RQLPSLACKY

SEQ ID NO: 996 - protein, 10 aa, Homo sapiens
  Table 2 sequence identifier: Q9Y2S7_C143
  MOD_RES (3)..(3): May or may not be conjugated to a chemical probe
RDCPHISQRS

SEQ ID NO: 997 - protein, 10 aa, Homo sapiens
  Table 2 sequence identifier: E2QRD5_C183
  MOD_RES (2)..(2): May or may not be conjugated to a chemical probe
KCNFTGDGKT

SEQ ID NO: 998 - protein, 18 aa, Homo sapiens
  Table 2 sequence identifier: O95833_C22
  MOD_RES (12)..(12): May or may not be conjugated to a chemical probe
KASEDGESVGHCPSCQRL

SEQ ID NO: 999 - protein, 24 aa, Homo sapiens
  Table 2 sequence identifier: O94953_C694
  MOD_RES (16)..(16): May or may not be conjugated to a chemical probe
RTEPYCAICTLFYPYCQALQTEKE

SEQ ID NO: 1000 - protein, 18 aa, Homo sapiens
  Table 2 sequence identifier: O00541_C272
  MOD_RES (14)..(14): May or may not be conjugated to a chemical probe
KAGEGTYALDSESCMEKL

SEQ ID NO: 1001 - protein, 19 aa, Homo sapiens
  Table 2 sequence identifier: Q9NXJ5_C149
  MOD_RES (4)..(4): May or may not be conjugated to a chemical probe
RYLCDFTYYTSLYQSHGRS

SEQ ID NO: 1002 - protein, 32 aa, Homo sapiens; identical to SEQ ID NO: 661
  Table 2 sequence identifier: Q8N5L8_C131
  MOD_RES (9)..(9): May or may not be conjugated to a chemical probe

SEQ ID NO: 1003 - protein, 26 aa, Homo sapiens
  Table 2 sequence identifier: Q8IZ73_C246
  MOD_RES (23)..(23): May or may not be conjugated to a chemical probe
RLLAENEDVVVVDKPSSIPVHPCGRF

SEQ ID NO: 1004 - protein, 19 aa, Homo sapiens
  Table 2 sequence identifier: Q99798_C385
  MOD_RES (8)..(8): May or may not be conjugated to a chemical probe
RVGLIGSCTNSSYEDMGRS

SEQ ID NO: 1005 - protein, 24 aa, Homo sapiens
  Table 2 sequence identifier: Q9GZR2_C382
  MOD_RES (13)..(13): May or may not be conjugated to a chemical probe
KILGLQVQQAEHCSIQDAQAAMRL

SEQ ID NO: 1006 - protein, 24 aa, Homo sapiens
  Table 2 sequence identifier: Q13613_C117
  MOD_RES (7)..(7): May or may not be conjugated to a chemical probe
KDVMYICPFMGAVSGTLTVTDFKL

SEQ ID NO: 1007 - protein, 11 aa, Homo sapiens
  Table 2 sequence identifier: Q9NUI1_C22
  MOD_RES (5)..(5): May or may not be conjugated to a chemical probe
RHLFCPDLLRD

SEQ ID NO: 1008 - protein, 13 aa, Homo sapiens
  Table 2 sequence identifier: Q02556_C306
  MOD_RES (11)..(11): May or may not be conjugated to a chemical probe
RVFCSGNAVVCKG

SEQ ID NO: 1009 - protein, 12 aa, Homo sapiens
  Table 2 sequence identifier: Q9UPT9_C171
  MOD_RES (6)..(6): May or may not be conjugated to a chemical probe
KITSNCTIGLRG

SEQ ID NO: 1010 - protein, 10 aa, Homo sapiens
  Table 2 sequence identifier: Q8N999_C302
  MOD_RES (2)..(2): May or may not be conjugated to a chemical probe
KCLFNHFLKI

SEQ ID NO: 1011 - protein, 31 aa, Homo sapiens
  Table 2 sequence identifier: Q8IU81_C363
  MOD_RES (25)..(25): May or may not be conjugated to a chemical probe
RSFREPAPAEALPQQYPEPAPAALCGPPPRA

SEQ ID NO: 1012 - protein, 9 aa, Homo sapiens
  Table 2 sequence identifier: Q9C0I1_C152
  MOD_RES (6)..(6): May or may not be conjugated to a chemical probe
RVFQFCLRY

SEQ ID NO: 1013 - protein, 16 aa, Homo sapiens
  Table 2 sequence identifier: Q9P2X3_C195
  MOD_RES (13)..(13): May or may not be conjugated to a chemical probe
RSTFQAHLAPVVCPKQ

SEQ ID NO: 1014 - protein, 11 aa, Homo sapiens
  Table 2 sequence identifier: Q6QNY0_C168
  MOD_RES (5)..(5): May or may not be conjugated to a chemical probe
RGDLCALAERL

SEQ ID NO: 1015 - protein, 38 aa, Homo sapiens; identical to SEQ ID NO: 552
  Table 2 sequence identifier: Q15796_C81
  MOD_RES (9)..(9): May or may not be conjugated to a chemical probe

SEQ ID NO: 1016 - protein, 21 aa, Homo sapiens
  Table 2 sequence identifier: Q9NZB2_C531
  MOD_RES (13)..(13): May or may not be conjugated to a chemical probe
KGSQMGTVQPIPCLLSMPTRN

SEQ ID NO: 1017 - protein, 14 aa, Homo sapiens
  Table 2 sequence identifier: Q9HB90_C377
  MOD_RES (3)..(3): May or may not be conjugated to a chemical probe
RSCGHQTSASSLKA

SEQ ID NO: 1018 - protein, 16 aa, Homo sapiens
  Table 2 sequence identifier: Q9BR61_C267
  MOD_RES (14)..(14): May or may not be conjugated to a chemical probe
RDQDGCLPEEVTGCKT

SEQ ID NO: 1019 - protein, 14 aa, Homo sapiens
  Table 2 sequence identifier: P16455_C145
  MOD_RES (11)..(11): May or may not be conjugated to a chemical probe
RGNPVPILIPCHRV

SEQ ID NO: 1020 - protein, 10 aa, Homo sapiens
  Table 2 sequence identifier: Q86UV5_C39
  MOD_RES (7)..(7): May or may not be conjugated to a chemical probe
RIWLEPCIRG

SEQ ID NO: 1021 - protein, 26 aa, Homo sapiens
  Table 2 sequence identifier: A2A288_C367
  MOD_RES (20)..(20): May or may not be conjugated to a chemical probe
RLAFSDDLGPLGPPLPVPACSLTPRL

SEQ ID NO: 1022 - protein, 12 aa, Homo sapiens
  Table 2 sequence identifier: Q8NEC7_C140
  MOD_RES (3)..(3): May or may not be conjugated to a chemical probe
KACAEVSQWTRL

SEQ ID NO: 1023 - protein, 25 aa, Homo sapiens
  Table 2 sequence identifier: Q6PJG6_C673
  MOD_RES (4)..(4): May or may not be conjugated to a chemical probe
RTHCPYAVALPEVAPAQPLTEALRA

SEQ ID NO: 1024 - protein, 18 aa, Homo sapiens
  Table 2 sequence identifier: Q13232_C158
  MOD_RES (7)..(7): May or may not be conjugated to a chemical probe
RADELLCWEDSAGHWLYE

SEQ ID NO: 1025 - protein, 38 aa, Homo sapiens; identical to SEQ ID NO: 336
  Table 2 sequence identifier: Q86X76_C165
  MOD_RES (5)..(5): May or may not be conjugated to a chemical probe

SEQ ID NO: 1026 - protein, 9 aa, Homo sapiens
  Table 2 sequence identifier: P42695_C541
  MOD_RES (2)..(2): May or may not be conjugated to a chemical probe
RCVMAMLRR

SEQ ID NO: 1027 - protein, 21 aa, Homo sapiens
  Table 2 sequence identifier: P41226_C599
  MOD_RES (17)..(17): May or may not be conjugated to a chemical probe
RAPASAAASEDAPYPVCTVRY

SEQ ID NO: 1028 - protein, 35 aa, Homo sapiens; identical to SEQ ID NO: 488
  Table 2 sequence identifier: Q99986_C50
  MOD_RES (13)..(13): May or may not be conjugated to a chemical probe

SEQ ID NO: 1029 - protein, 17 aa, Homo sapiens
  Table 2 sequence identifier: Q8WUM4_C90
  MOD_RES (10)..(10): May or may not be conjugated to a chemical probe
KFPFSENQICLTFTWKD

SEQ ID NO: 1030 - protein, 23 aa, Homo sapiens
  Table 2 sequence identifier: P29590_C213
  MOD_RES (9)..(9): May or may not be conjugated to a chemical probe
RGCSKPLCCSCALLDSSHSELKC

SEQ ID NO: 1031 - protein, 9 aa, Homo sapiens
  Table 2 sequence identifier: Q9P0K7_C973
  MOD_RES (7)..(7): May or may not be conjugated to a chemical probe
KQILTMCKN

SEQ ID NO: 1032 - protein, 44 aa, Homo sapiens; identical to SEQ ID NO: 489
  Table 2 sequence identifier: P53992_C78
  MOD_RES (18)..(18): May or may not be conjugated to a chemical probe

SEQ ID NO: 1033 - protein, 13 aa, Homo sapiens
  Table 2 sequence identifier: Q13867_C73
  MOD_RES (2)..(2): May or may not be conjugated to a chemical probe
RCWIFSCLNVMRL

SEQ ID NO: 1034 - protein, 11 aa, Homo sapiens
  Table 2 sequence identifier: Q8ND24_C655
  MOD_RES (9)..(9): May or may not be conjugated to a chemical probe
RSSHAPATCKL

SEQ ID NO: 1035 - protein, 19 aa, Homo sapiens
  Table 2 sequence identifier: Q96EK4_C48
  MOD_RES (7)..(7): May or may not be conjugated to a chemical probe
RAGVSGCFSTFQPTTGHRL

SEQ ID NO: 1036 - protein, 15 aa, Homo sapiens
  Table 2 sequence identifier: Q96IV0_C309
  MOD_RES (2)..(2): May or may not be conjugated to a chemical probe
RCGEWANCFTLCCRA

SEQ ID NO: 1037 - protein, 10 aa, Homo sapiens
  Table 2 sequence identifier: Q5T1V6_C414
  MOD_RES (5)..(5): May or may not be conjugated to a chemical probe
KNLPCANVRQ

SEQ ID NO: 1038 - protein, 19 aa, Homo sapiens
  Table 2 sequence identifier: Q9UHQ1_C99
  MOD_RES (8)..(8): May or may not be conjugated to a chemical probe
KVLVVSVCPQSLPYFAAKF

SEQ ID NO: 1039 - protein, 9 aa, Homo sapiens
  Table 2 sequence identifier: O43396_C34
  MOD_RES (3)..(3): May or may not be conjugated to a chemical probe
RGCGPCLRI

SEQ ID NO: 1040 - protein, 26 aa, Homo sapiens
  Table 2 sequence identifier: Q8IV53_C174
  MOD_RES (9)..(9): May or may not be conjugated to a chemical probe
RGNSKPLSCFVAPDSGRLPSIPENRN

SEQ ID NO: 1041 - protein, 17 aa, Homo sapiens
  Table 2 sequence identifier: Q8N9T8_C673
  MOD_RES (12)..(12): May or may not be conjugated to a chemical probe
RLLGPTVMLGGCEFSRQ

SEQ ID NO: 1042 - protein, 24 aa, Homo sapiens
  Table 3 sequence identifier: P26641_C266
  MOD_RES (14)..(14): May or may not be conjugated to a chemical probe
KAAAPAPEEEMDECEQALAAEPKA

SEQ ID NO: 1043 - protein, 21 aa, Homo sapiens
  Table 3 sequence identifier: P07900_C374
  MOD_RES (8)..(8): May or may not be conjugated to a chemical probe
RVFIMDNCEELIPEYLNFIRG

SEQ ID NO: 1044 - protein, 14 aa, Homo sapiens
  Table 3 sequence identifier: P23528_C139
  MOD_RES (8)..(8): May or may not be conjugated to a chemical probe
KHELQANCYEEVKD

SEQ ID NO: 1045 - protein, 30 aa, Homo sapiens
  Table 3 sequence identifier: P68104_C411
  MOD_RES (17)..(17): May or may not be conjugated to a chemical probe
KSGDAAIVDMVPGKPMCVESFSDYPPLGRF

SEQ ID NO: 1046 - protein, 22 aa, Homo sapiens
  Table 3 sequence identifier: P08238_C366
  MOD_RES (9)..(9): May or may not be conjugated to a chemical probe
RRVFIMDSCDELIPEYLNFIRG

SEQ ID NO: 1047 - protein, 15 aa, Homo sapiens
  Table 3 sequence identifier: P60981_C163
  MOD_RES (13)..(13): May or may not be conjugated to a chemical probe
KLGGSLIVAFEGCPV

SEQ ID NO: 1048 - protein, 38 aa, Homo sapiens; identical to SEQ ID NO: 760
  Table 3 sequence identifier: P61978_C132
  MOD_RES (30)..(30): May or may not be conjugated to a chemical probe

SEQ ID NO: 1049 - protein, 27 aa, Homo sapiens
  Table 3 sequence identifier: P60709_C217
  MOD_RES (5)..(5): May or may not be conjugated to a chemical probe
KEKLCYVALDFEQEMATAASSSSLEKS

SEQ ID NO: 1050 - protein, 13 aa, Homo sapiens
  Table 3 sequence identifier: Q15365_C54
  MOD_RES (9)..(9): May or may not be conjugated to a chemical probe
RINISEGNCPERI

SEQ ID NO: 1051 - protein, 30 aa, Homo sapiens
  Table 3 sequence identifier: P60709_C272
  MOD_RES (17)..(17): May or may not be conjugated to a chemical probe
RCPEALFQPSFLGMESCGIHETTFNSIMKC

SEQ ID NO: 1052 - protein, 13 aa, Homo sapiens
  Table 3 sequence identifier: P27348_C134
  MOD_RES (8)..(8): May or may not be conjugated to a chemical probe
RYLAEVACGDDRK

SEQ ID NO: 1053 - protein, 15 aa, Homo sapiens
  Table 3 sequence identifier: P55769_C30
  MOD_RES (11)..(11): May or may not be conjugated to a chemical probe
KKLLDLVQQSCNYKQ

SEQ ID NO: 1054 - protein, 31 aa, Homo sapiens
  Table 3 sequence identifier: Q6IS14_C129
  MOD_RES (9)..(9): May or may not be conjugated to a chemical probe
KEIEQKYDCGEEILITVLSAMTEEAAVAIKA

SEQ ID NO: 1055 - protein, 10 aa, Homo sapiens
  Table 3 sequence identifier: P11413_C13
  MOD_RES (5)..(5): May or may not be conjugated to a chemical probe
RTQVCGILRE

SEQ ID NO: 1056 - protein, 16 aa, Homo sapiens
  Table 3 sequence identifier: P04406_C247
  MOD_RES (14)..(14): May or may not be conjugated to a chemical probe
RVPTANVSVVDLTCRL

SEQ ID NO: 1057 - protein, 9 aa, Homo sapiens
  Table 3 sequence identifier: P37802_C124
  MOD_RES (5)..(5): May or may not be conjugated to a chemical probe
KNMACVQRT

SEQ ID NO: 1058 - protein, 13 aa, Homo sapiens
  Table 3 sequence identifier: Q13185_C177
  MOD_RES (7)..(7): May or may not be conjugated to a chemical probe
RLTWHSCPEDEAQ

SEQ ID NO: 1059 - protein, 32 aa, Homo sapiens
  Table 3 sequence identifier: Q9Y3F4_C340
  MOD_RES (22)..(22): May or may not be conjugated to a chemical probe
KIGFPETTEEELEEIASENSDCIFPSAPDVKA

SEQ ID NO: 1060 - protein, 30 aa, Homo sapiens
  Table 3 sequence identifier: Q9NTK5_C55
  MOD_RES (21)..(21): May or may not be conjugated to a chemical probe
KSTFFNVLTNSQASAENFPFCTIDPNESRV

SEQ ID NO: 1061 - protein, 13 aa, Homo sapiens
  Table 3 sequence identifier: P53396_C20
  MOD_RES (4)..(4): May or may not be conjugated to a chemical probe
KFICTTSAIQNRF

SEQ ID NO: 1062 - protein, 15 aa, Homo sapiens
  Table 3 sequence identifier: P62826_C112
  MOD_RES (3)..(3): May or may not be conjugated to a chemical probe
RVCENIPIVLCGNKV

SEQ ID NO: 1063 - protein, 13 aa, Homo sapiens
  Table 3 sequence identifier: P15880_C229
  MOD_RES (3)..(3): May or may not be conjugated to a chemical probe
RGCTATLGNFAKA

SEQ ID NO: 1064 - protein, 23 aa, Homo sapiens
  Table 3 sequence identifier: P08238_C589
  MOD_RES (7)..(7): May or may not be conjugated to a chemical probe
RLVSSPCCIVTSTYGWTANMERI

SEQ ID NO: 1065 - protein, 20 aa, Homo sapiens
  Table 3 sequence identifier: P30084_C62
  MOD_RES (7)..(7): May or may not be conjugated to a chemical probe
KALNALCDGLIDELNQALKT

SEQ ID NO: 1066 - protein, 27 aa, Homo sapiens
  Table 3 sequence identifier: P47756_C36
  MOD_RES (14)..(14): May or may not be conjugated to a chemical probe
KNLSDLIDLVPSLCEDLLSSVDQPLKI

SEQ ID NO: 1067 - protein, 27 aa, Homo sapiens
  Table 3 sequence identifier: P52292_C223
  MOD_RES (22)..(22): May or may not be conjugated to a chemical probe
KYGAVDPLLALLAVPDMSSLACGYLRN

SEQ ID NO: 1068 - protein, 16 aa, Homo sapiens
  Table 3 sequence identifier: Q15366_C109
  MOD_RES (9)..(9): May or may not be conjugated to a chemical probe
RLVVPASQCGSLIGKG

SEQ ID NO: 1069 - protein, 11 aa, Homo sapiens
  Table 3 sequence identifier: P14174_C81
  MOD_RES (4)..(4): May or may not be conjugated to a chemical probe
KLLCGLLAERL

SEQ ID NO: 1070 - protein, 21 aa, Homo sapiens
  Table 3 sequence identifier: P61981_C97
  MOD_RES (7)..(7): May or may not be conjugated to a chemical probe
KELEAVCQDVLSLLDNYLIKN

SEQ ID NO: 1071 - protein, 14 aa, Homo sapiens
  Table 3 sequence identifier: P00338_C163
  MOD_RES (7)..(7): May or may not be conjugated to a chemical probe
RVIGSGCNLDSARF

SEQ ID NO: 1072 - protein, 18 aa, Homo sapiens
  Table 3 sequence identifier: Q15019_C111
  MOD_RES (16)..(16): May or may not be conjugated to a chemical probe
RLTVVDTPGYGDAINCRD

SEQ ID NO: 1073 - protein, 34 aa, Homo sapiens
  Table 3 sequence identifier: P84243_C111
  MOD_RES (28)..(28): May or may not be conjugated to a chemical probe
RFQSAAIGALQEASEAYLVGLFEDTNLCAIHAKR

SEQ ID NO: 1074 - protein, 16 aa, Homo sapiens
  Table 3 sequence identifier: P18085_C62
  MOD_RES (4)..(4): May or may not be conjugated to a chemical probe
KNICFTVWDVGGQDRI

SEQ ID NO: 1075 - protein, 11 aa, Homo sapiens
  Table 3 sequence identifier: P10599_C73
  MOD_RES (2)..(2): May or may not be conjugated to a chemical probe
KCMPTFQFFKK

SEQ ID NO: 1076 - protein, 27 aa, Homo sapiens
  Table 3 sequence identifier: P13639_C466
  MOD_RES (11)..(11): May or may not be conjugated to a chemical probe
RYVEPIEDVPCGNIVGLVGVDQFLVKT

SEQ ID NO: 1077 - protein, 23 aa, Homo sapiens
  Table 3 sequence identifier: P00338_C293
  MOD_RES (10)..(10): May or may not be conjugated to a chemical probe
KDDVFLSVPCILGQNGISDLVKV

SEQ ID NO: 1078 - protein, 10 aa, Homo sapiens
  Table 3 sequence identifier: P49721_C91
  MOD_RES (7)..(7): May or may not be conjugated to a chemical probe
RRNLADCLRS

SEQ ID NO: 1079 - protein, 12 aa, Homo sapiens
  Table 3 sequence identifier: P28062_C160
  MOD_RES (8)..(8): May or may not be conjugated to a chemical probe
KLLSNMMCQYRG

SEQ ID NO: 1080 - protein, 15 aa, Homo sapiens
  Table 3 sequence identifier: P10809_C237
  MOD_RES (2)..(2): May or may not be conjugated to a chemical probe
KCEFQDAYVLLSEKK

SEQ ID NO: 1081 - protein, 10 aa, Homo sapiens
  Table 3 sequence identifier: P60981_C23
  MOD_RES (2)..(2): May or may not be conjugated to a chemical probe
KCSTPEEIKK

SEQ ID NO: 1082 - protein, 15 aa, Homo sapiens
  Table 3 sequence identifier: P31943_C267
  MOD_RES (6)..(6): May or may not be conjugated to a chemical probe
RDLNYCFSGMSDHRY

SEQ ID NO: 1083 - protein, 22 aa, Homo sapiens
  Table 3 sequence identifier: P49321_C708
  MOD_RES (12)..(12): May or may not be conjugated to a chemical probe
RKPTDGASSSNCVTDISHLVRK

SEQ ID NO: 1084 - protein, 11 aa, Homo sapiens
  Table 3 sequence identifier: Q99829_C53
  MOD_RES (3)..(3): May or may not be conjugated to a chemical probe
RNCSSPEFSKT

SEQ ID NO: 1085 - protein, 31 aa, Homo sapiens
  Table 3 sequence identifier: P68104_C111
  MOD_RES (12)..(12): May or may not be conjugated to a chemical probe
KNMITGTSQADCAVLIVAAGVGEFEAGISKN

SEQ ID NO: 1086 - protein, 24 aa, Homo sapiens
  Table 3 sequence identifier: Q02750_C207
  MOD_RES (3)..(3): May or may not be conjugated to a chemical probe
KLCDFGVSGQLIDSMANSFVGTRS

SEQ ID NO: 1087 - protein, 22 aa, Homo sapiens
  Table 3 sequence identifier: O14950_C109
  MOD_RES (6)..(6): May or may not be conjugated to a chemical probe
RNAFACFDEEATGTIQEDYLRE

SEQ ID NO: 1088 - protein, 22 aa, Homo sapiens
  Table 3 sequence identifier: P47756_C206
  MOD_RES (12)..(12): May or may not be conjugated to a chemical probe
RQMEKDETVSDCSPHIANIGRL

SEQ ID NO: 1089 - protein, 19 aa, Homo sapiens
  Table 3 sequence identifier: P49327_C1448
  MOD_RES (5)..(5): May or may not be conjugated to a chemical probe
KAINCATSGVVGLVNCLRR

SEQ ID NO: 1090 - protein, 13 aa, Homo sapiens
  Table 3 sequence identifier: P14868_C349
  MOD_RES (5)..(5): May or may not be conjugated to a chemical probe
RLEYCEALAMLRE

SEQ ID NO: 1091 - protein, 41 aa, Homo sapiens; identical to SEQ ID NO: 755
  Table 3 sequence identifier: P07437_C201
  MOD_RES (28)..(28): May or may not be conjugated to a chemical probe

SEQ ID NO: 1092 - protein, 11 aa, Homo sapiens
  Table 3 sequence identifier: P07437_C303
  MOD_RES (7)..(7): May or may not be conjugated to a chemical probe
KNMMAACDPRH

SEQ ID NO: 1093 - protein, 26 aa, Homo sapiens
  Table 3 sequence identifier: P61077_C111
  MOD_RES (11)..(11): May or may not be conjugated to a chemical probe
KVLLSICSLLCDPNPDDPLVPEIARI

SEQ ID NO: 1094 - protein, 11 aa, Homo sapiens
  Table 3 sequence identifier: P15153_C178
  MOD_RES (5)..(5): May or may not be conjugated to a chemical probe
RAVLCPQPTRQ

SEQ ID NO: 1095 - protein, 21 aa, Homo sapiens
  Table 3 sequence identifier: Q04637_C662
  MOD_RES (7)..(7): May or may not be conjugated to a chemical probe
RLQGINCGPDFTPSFANLGRT

SEQ ID NO: 1096 - protein, 15 aa, Homo sapiens
  Table 3 sequence identifier: P78347_C215
  MOD_RES (10)..(10): May or may not be conjugated to a chemical probe
RSILSPGGSCGPIKV

SEQ ID NO: 1097 - protein, 39 aa, Homo sapiens
  Table 3 sequence identifier: Q15370_C89
  MOD_RES (10)..(10): May or may not be conjugated to a chemical probe
RADDTFEALCIEPFSSPPELPDVMKPQDSGSSANEQAVQ

SEQ ID NO: 1098 - protein, 14 aa, Homo sapiens
  Table 3 sequence identifier: P62753_C12
  MOD_RES (11)..(11): May or may not be conjugated to a chemical probe
KLNISFPATGCQKL

SEQ ID NO: 1099 - protein, 11 aa, Homo sapiens
  Table 3 sequence identifier: P31948_C461
  MOD_RES (9)..(9): May or may not be conjugated to a chemical probe
KALDLDSSCKE

SEQ ID NO: 1100 - protein, 11 aa, Homo sapiens
  Table 3 sequence identifier: Q9UL46_C91
  MOD_RES (2)..(2): May or may not be conjugated to a chemical probe
KCGFLPGNEKV

SEQ ID NO: 1101 - protein, 11 aa, Homo sapiens
  Table 3 sequence identifier: P63220_C56
  MOD_RES (6)..(6): May or may not be conjugated to a chemical probe
KTYAICGAIRR

SEQ ID NO: 1102 - protein, 30 aa, Homo sapiens
  Table 3 sequence identifier: P55809_C67
  MOD_RES (17)..(17): May or may not be conjugated to a chemical probe
KDIPDGATVLVGGFGLCGIPENLIDALLKT

SEQ ID NO: 1103 - protein, 25 aa, Homo sapiens
  Table 3 sequence identifier: P30153_C377
  MOD_RES (20)..(20): May or may not be conjugated to a chemical probe
KDNTIEHLLPLFLAQLKDECPEVRL

SEQ ID NO: 1104 - protein, 19 aa, Homo sapiens
  Table 3 sequence identifier: P30153_C390
  MOD_RES (10)..(10): May or may not be conjugated to a chemical probe
RLNIISNLDCVNEVIGIRQ

SEQ ID NO: 1105 - protein, 10 aa, Homo sapiens
  Table 3 sequence identifier: P60866_C70
  MOD_RES (4)..(4): May or may not be conjugated to a chemical probe
KTPCGEGSKT

SEQ ID NO: 1106 - protein, 11 aa, Homo sapiens
  Table 3 sequence identifier: Q9P258_C428
  MOD_RES (7)..(7): May or may not be conjugated to a chemical probe
KAVQDLCGWRI

SEQ ID NO: 1107 - protein, 9 aa, Homo sapiens
  Table 3 sequence identifier: P60709_C285
  MOD_RES (2)..(2): May or may not be conjugated to a chemical probe
KCDVDIRKD

SEQ ID NO: 1108 - protein, 23 aa, Homo sapiens
  Table 3 sequence identifier: P22234_C81
  MOD_RES (2)..(2): May or may not be conjugated to a chemical probe
KCGETAFIAPQCEMIPIEWVCRR

SEQ ID NO: 1109 - protein, 24 aa, Homo sapiens
  Table 3 sequence identifier: P27348_C237
  MOD_RES (16)..(16): May or may not be conjugated to a chemical probe
RDNLTLWTSDSAGEECDAAEGAEN

SEQ ID NO: 1110 - protein, 13 aa, Homo sapiens
  Table 3 sequence identifier: P12004_C81
  MOD_RES (2)..(2): May or may not be conjugated to a chemical probe
KCAGNEDIITLRA

SEQ ID NO: 1111 - protein, 27 aa, Homo sapiens
  Table 3 sequence identifier: P68104_C234
  MOD_RES (16)..(16): May or may not be conjugated to a chemical probe
KDGNASGTTLLEALDCILPPTRPTDKP

SEQ ID NO: 1112 - protein, 28 aa, Homo sapiens
  Table 3 sequence identifier: Q96FW1_C23
  MOD_RES (14)..(14): May or may not be conjugated to a chemical probe
KQEPLGSDSEGVNCLAYDEAIMAQQDRI

SEQ ID NO: 1113 - protein, 14 aa, Homo sapiens
  Table 3 sequence identifier: Q13200_C779
  MOD_RES (7)..(7): May or may not be conjugated to a chemical probe
KGTLTLCPYHSDRQ

SEQ ID NO: 1114 - protein, 10 aa, Homo sapiens
  Table 3 sequence identifier: P22314_C632
  MOD_RES (6)..(6): May or may not be conjugated to a chemical probe
KSIPICTLKN

SEQ ID NO: 1115 - protein, 21 aa, Homo sapiens
  Table 3 sequence identifier: P37802_C38
  MOD_RES (19)..(19): May or may not be conjugated to a chemical probe
KQYDADLEQILIQWITTQCRK

SEQ ID NO: 1116 - protein, 23 aa, Homo sapiens
  Table 3 sequence identifier: P37802_C63
  MOD_RES (7)..(7): May or may not be conjugated to a chemical probe
KDGTVLCELINALYPEGQAPVKK

SEQ ID NO: 1117 - protein, 17 aa, Homo sapiens
  Table 3 sequence identifier: P46782_C172
  MOD_RES (6)..(6): May or may not be conjugated to a chemical probe
KTIAECLADELINAAKG

SEQ ID NO: 1118 - protein, 13 aa, Homo sapiens
  Table 3 sequence identifier: P04075_C339
  MOD_RES (9)..(9): May or may not be conjugated to a chemical probe
RALANSLACQGKY

SEQ ID NO: 1119 - protein, 45 aa, Homo sapiens
  Table 3 sequence identifier: P05386_C61
  MOD_RES (13)..(13): May or may not be conjugated to a chemical probe
KALANVNIGSLICNVGAGGPAPAAGAAPAGGPAPSTAAAPAEEKK

SEQ ID NO: 1120 - protein, 11 aa, Homo sapiens
  Table 3 sequence identifier: P63000_C178
  MOD_RES (5)..(5): May or may not be conjugated to a chemical probe
RAVLCPPPVKK

SEQ ID NO: 1121 - protein, 22 aa, Homo sapiens
  Table 3 sequence identifier: P07195_C294
  MOD_RES (16)..(16): May or may not be conjugated to a chemical probe
KGMYGIENEVFLSLPCILNARG

SEQ ID NO: 1122 - protein, 26 aa, Homo sapiens
  Table 3 sequence identifier: Q13148_C244
  MOD_RES (18)..(18): May or may not be conjugated to a chemical probe
RAFAFVTFADDQIAQSLCGEDLIIKG

SEQ ID NO: 1123 - protein, 33 aa, Homo sapiens
  Table 3 sequence identifier: P30048_C229
  MOD_RES (13)..(13): May or may not be conjugated to a chemical probe
KAFQYVETHGEVCPANWTPDSPTIKPSPAASKE

SEQ ID NO: 1124 - protein, 10 aa, Homo sapiens
  Table 3 sequence identifier: P62306_C66
  MOD_RES (2)..(2): May or may not be conjugated to a chemical probe
RCNNVLYIRG

SEQ ID NO: 1125 - protein, 25 aa, Homo sapiens
  Table 3 sequence identifier: O15371_C19
  MOD_RES (17)..(17): May or may not be conjugated to a chemical probe
KFMTPVIQDNPSGWGPCAVPEQFRD

SEQ ID NO: 1126 - protein, 12 aa, Homo sapiens
  Table 3 sequence identifier: P17987_C397
  MOD_RES (8)..(8): May or may not be conjugated to a chemical probe
RSLHDALCVVKR

SEQ ID NO: 1127 - protein, 20 aa, Homo sapiens
  Table 3 sequence identifier: Q9Y5P6_C245
  MOD_RES (3)..(3): May or may not be conjugated to a chemical probe
RLCSGPGIVGNVLVDPSARI

SEQ ID NO: 1128 - protein, 10 aa, Homo sapiens
  Table 3 sequence identifier: Q9BW61_C25
  MOD_RES (8)..(8): May or may not be conjugated to a chemical probe
RFHADSVCKA

SEQ ID NO: 1129 - protein, 21 aa, Homo sapiens
  Table 3 sequence identifier: Q14974_C585
  MOD_RES (12)..(12): May or may not be conjugated to a chemical probe
RIQFNDLQSLLCATLQNVLRK

SEQ ID NO: 1130 - protein, 11 aa, Homo sapiens
  Table 3 sequence identifier: Q9BUF5_C303
  MOD_RES (7)..(7): May or may not be conjugated to a chemical probe
RNMMAACDPRH

SEQ ID NO: 1131 - protein, 9 aa, Homo sapiens
  Table 3 sequence identifier: P52272_C653
  MOD_RES (3)..(3): May or may not be conjugated to a chemical probe
KACQIFVRN

SEQ ID NO: 1132 - protein, 23 aa, Homo sapiens
  Table 3 sequence identifier: O75940_C214
  MOD_RES (7)..(7): May or may not be conjugated to a chemical probe
KVGVGTCGIADKPMTQYQDTSKY

SEQ ID NO: 1133 - protein, 18 aa, Homo sapiens
  Table 3 sequence identifier: O00233_C59
  MOD_RES (12)..(12): May or may not be conjugated to a chemical probe
KGIGMNEPLVDCEGYPRS

SEQ ID NO: 1134 - protein, 9 aa, Homo sapiens
  Table 3 sequence identifier: P63208_C160
  MOD_RES (6)..(6): May or may not be conjugated to a chemical probe
KENQWCEEK

SEQ ID NO: 1135 - protein, 23 aa, Homo sapiens
  Table 3 sequence identifier: Q9Y224_C19
  MOD_RES (15)..(15): May or may not be conjugated to a chemical probe
KLTALDYHNPAGFNCKDETEFRN

SEQ ID NO: 1136 - protein, 23 aa, Homo sapiens
  Table 3 sequence identifier: P30626_C194
  MOD_RES (19)..(19): May or may not be conjugated to a chemical probe
RDTAQQGVVNFPYDDFIQCVMSV

SEQ ID NO: 1137 - protein, 29 aa, Homo sapiens
  Table 3 sequence identifier: Q9BXW7_C392
  MOD_RES (4)..(4): May or may not be conjugated to a chemical probe
RDLCFSPGLMEASHVVNDVNEAVQLVFRK

SEQ ID NO: 1138 - protein, 25 aa, Homo sapiens
  Table 3 sequence identifier: P60842_C134
  MOD_RES (17)..(17): May or may not be conjugated to a chemical probe
KVVMALGDYMGASCHACIGGTNVRA

SEQ ID NO: 1139 - protein, 8 aa, Homo sapiens
  Table 3 sequence identifier: P63220_C17
  MOD_RES (2)..(2): May or may not be conjugated to a chemical probe
KCSASNRI

SEQ ID NO: 1140 - protein, 17 aa, Homo sapiens
  Table 3 sequence identifier: P50990_C149
  MOD_RES (13)..(13): May or may not be conjugated to a chemical probe
RKAHEILPNLVCCSAKN

SEQ ID NO: 1141 - protein, 17 aa, Homo sapiens
  Table 3 sequence identifier: P22234_C63
  MOD_RES (5)..(5): May or may not be conjugated to a chemical probe
KITSCIFQLLQEAGIKT

SEQ ID NO: 1142 - protein, 38 aa, Homo sapiens
  Table 3 sequence identifier: Q13148_C39
  MOD_RES (34)..(34): May or may not be conjugated to a chemical probe
RVTEDENDEPIEIPSEDDGTVLLSTVTAQFPGACGLRY

SEQ ID NO: 1143 - protein, 12 aa, Homo sapiens
  Table 3 sequence identifier: P17987_C357
  MOD_RES (3)..(3): May or may not be conjugated to a chemical probe
RICDDELILIKN

SEQ ID NO: 1144 - protein, 20 aa, Homo sapiens
  Table 3 sequence identifier: P31946_C96
  MOD_RES (10)..(10): May or may not be conjugated to a chemical probe
KIEAELQDICNDVLELLDKY

SEQ ID NO: 1145 - protein, 14 aa, Homo sapiens
  Table 3 sequence identifier: P61289_C92
  MOD_RES (5)..(5): May or may not be conjugated to a chemical probe
RLDECEEAFQGTKV

SEQ ID NO: 1146 - protein, 30 aa, Homo sapiens
  Table 3 sequence identifier: P26641_C68
  MOD_RES (12)..(12): May or may not be conjugated to a chemical probe
KVPAFEGDDGFCVFESNAIAYYVSNEELRG

SEQ ID NO: 1147 - protein, 16 aa, Homo sapiens
  Table 3 sequence identifier: P78371_C395
  MOD_RES (8)..(8): May or may not be conjugated to a chemical probe
RSLHDALCVLAQTVKD

SEQ ID NO: 1148 - protein, 12 aa, Homo sapiens
  Table 3 sequence identifier: P14868_C203
  MOD_RES (7)..(7): May or may not be conjugated to a chemical probe
RLQSGICHLFRE

SEQ ID NO: 1149 - protein, 26 aa, Homo sapiens
  Table 3 sequence identifier: Q92530_C185
  MOD_RES (6)..(6): May or may not be conjugated to a chemical probe
RQPPWCDPLGPFVVGGEDLDPFGPRR

SEQ ID NO: 1150 - protein, 11 aa, Homo sapiens
  Table 3 sequence identifier: P25398_C92
  MOD_RES (9)..(9): May or may not be conjugated to a chemical probe
KLGEWVGLCKI

SEQ ID NO: 1151 - protein, 11 aa, Homo sapiens
  Table 3 sequence identifier: P25205_C148
  MOD_RES (6)..(6): May or may not be conjugated to a chemical probe
RSVHYCPATKK

SEQ ID NO: 1152 - protein, 22 aa, Homo sapiens
  Table 3 sequence identifier: P60174_C79
  MOD_RES (10)..(10): May or may not be conjugated to a chemical probe
KVPADTEVVCAPPTAYIDFARQ

SEQ ID NO: 1153 - protein, 25 aa, Homo sapiens
  Table 3 sequence identifier: P43487_C132
  MOD_RES (15)..(15): May or may not be conjugated to a chemical probe
RAWVWNTHADFADECPKPELLAIRF

SEQ ID NO: 1154 - protein, 20 aa, Homo sapiens
  Table 3 sequence identifier: P62280_C131
  MOD_RES (14)..(14): May or may not be conjugated to a chemical probe
RDVQIGDIVTVGECRPLSKT

SEQ ID NO: 1155 - protein, 21 aa, Homo sapiens
  Table 3 sequence identifier: P13639_C651
  MOD_RES (4)..(4): May or may not be conjugated to a chemical probe
KIWCFGPDGTGPNILTDITKG

SEQ ID NO: 1156 - protein, 28 aa, Homo sapiens
  Table 3 sequence identifier: P13639_C751
  MOD_RES (13)..(13): May or may not be conjugated to a chemical probe
RLMEPIYLVEIQCPEQVVGGIYGVLNRK

SEQ ID NO: 1157 - protein, 29 aa, Homo sapiens
  Table 3 sequence identifier: Q9NUQ9_C10
  MOD_RES (5)..(5): May or may not be conjugated to a chemical probe
KVLTCTDLEQGPNFFLDFENAQPTESEKE

SEQ ID NO: 1158 - protein, 16 aa, Homo sapiens
  Table 3 sequence identifier: P62937_C62
  MOD_RES (8)..(8): May or may not be conjugated to a chemical probe
RIIPGFMCQGGDFTRH

SEQ ID NO: 1159 - protein, 12 aa, Homo sapiens
  Table 3 sequence identifier: P23528_C39
  MOD_RES (6)..(6): May or may not be conjugated to a chemical probe
KAVLFCLSEDKK

SEQ ID NO: 1160 - protein, 24 aa, Homo sapiens
  Table 3 sequence identifier: P46776_C70
  MOD_RES (6)..(6): May or may not be conjugated to a chemical probe
RNQSFCPTVNLDKLWTLVSEQTRV

SEQ ID NO: 1161 - protein, 13 aa, Homo sapiens
  Table 3 sequence identifier: P49915_C456
  MOD_RES (11)..(11): May or may not be conjugated to a chemical probe
RVICAEEPYICKD

SEQ ID NO: 1162 - protein, 14 aa, Homo sapiens
  Table 3 sequence identifier: Q16851_C123
  MOD_RES (12)..(12): May or may not be conjugated to a chemical probe
KLNGGLGTSMGCKG

SEQ ID NO: 1163 - protein, 27 aa, Homo sapiens
  Table 3 sequence identifier: P14618_C358
  MOD_RES (17)..(17): May or may not be conjugated to a chemical probe
RAEGSDVANAVLDGADCIMLSGETAKG

SEQ ID NO: 1164 - protein, 10 aa, Homo sapiens
  Table 3 sequence identifier: P14618_C474
  MOD_RES (8)..(8): May or may not be conjugated to a chemical probe
RGIFPVLCKD

SEQ ID NO: 1165 - protein, 24 aa, Homo sapiens
  Table 3 sequence identifier: P13489_C409
  MOD_RES (9)..(9): May or may not be conjugated to a chemical probe
RELDLSNNCLGDAGILQLVESVRQ

SEQ ID NO: 1166 - protein, 29 aa, Homo sapiens
  Table 3 sequence identifier: O15355_C241
  MOD_RES (22)..(22): May or may not be conjugated to a chemical probe
RGTEAGQVGEPGIPTGEAGPSCSSASDKL

SEQ ID NO: 1167 - protein, 34 aa, Homo sapiens
  Table 3 sequence identifier: P68431_C111
  MOD_RES (28)..(28): May or may not be conjugated to a chemical probe
RFQSSAVMALQEACEAYLVGLFEDTNLCAIHAKR

SEQ ID NO: 1168 - protein, 22 aa, Homo sapiens
  Table 3 sequence identifier: P08238_C521
  MOD_RES (16)..(16): May or may not be conjugated to a chemical probe
RGFEVVYMTEPIDEYCVQQLKE

SEQ ID NO: 1169 - protein, 15 aa, Homo sapiens
  Table 3 sequence identifier: Q99439_C175
  MOD_RES (2)..(2): May or may not be conjugated to a chemical probe
KCASQSGMTAYGTRR

SEQ ID NO: 1170 - protein, 24 aa, Homo sapiens
  Table 3 sequence identifier: O00299_C223
  MOD_RES (8)..(8): May or may not be conjugated to a chemical probe
REEFASTCPDDEEIELAYEQVAKA

SEQ ID NO: 1171 - protein, 21 aa, Homo sapiens
  Table 3 sequence identifier: Q96KB5_C22
  MOD_RES (5)..(5): May or may not be conjugated to a chemical probe
KSVLCSTPTINIPASPFMQKL

SEQ ID NO: 1172 - protein, 14 aa, Homo sapiens
  Table 3 sequence identifier: P00492_C106
  MOD_RES (4)..(4): May or may not be conjugated to a chemical probe
KSYCNDQSTGDIKV

SEQ ID NO: 1173 - protein, 10 aa, Homo sapiens
  Table 3 sequence identifier: Q15631_C225
  MOD_RES (7)..(7): May or may not be conjugated to a chemical probe
KETAAACVEK

SEQ ID NO: 1174 - protein, 43 aa, Homo sapiens
  Table 3 sequence identifier: P52565_C79
  MOD_RES (22)..(22): May or may not be conjugated to a chemical probe
RVAVSADPNVPNVVVTGLTLVCSSAPGPLELDLTGDLESFKKQ

SEQ ID NO: 1175 - protein, 35 aa, Homo sapiens
  Table 3 sequence identifier: P78417_C237
  MOD_RES (31)..(31): May or may not be conjugated to a chemical probe
KEDPTVSALLTSEKDWQGFLELYLQNSPEACDYGL

SEQ ID NO: 1176 - protein, 18 aa, Homo sapiens
  Table 3 sequence identifier: Q01518_C93
  MOD_RES (10)..(10): May or may not be conjugated to a chemical probe
RALLVTASQCQQPAENKL

SEQ ID NO: 1177 - protein, 10 aa, Homo sapiens
  Table 3 sequence identifier: Q13148_C50
  MOD_RES (7)..(7): May or may not be conjugated to a chemical probe
RNPVSQCMRG

SEQ ID NO: 1178 - protein, 17 aa, Homo sapiens
  Table 3 sequence identifier: P51665_C116
  MOD_RES (3)..(3): May or may not be conjugated to a chemical probe
RYCPNSVLVIIDVKPKD

SEQ ID NO: 1179 - protein, 25 aa, Homo sapiens
  Table 3 sequence identifier: P17987_C147
  MOD_RES (18)..(18): May or may not be conjugated to a chemical probe
RYINENLIVNTDELGRDCLINAAKT

SEQ ID NO: 1180 - protein, 24 aa, Homo sapiens
  Table 3 sequence identifier: O00299_C59
  MOD_RES (3)..(3): May or may not be conjugated to a chemical probe
KLCPGGQLPFLLYGTEVHTDTNKI

SEQ ID NO: 1181 - protein, 20 aa, Homo sapiens
  Table 3 sequence identifier: P61077_C85
  MOD_RES (14)..(14): May or may not be conjugated to a chemical probe
KIYHPNINSNGSICLDILRS

SEQ ID NO: 1182 - protein, 24 aa, Homo sapiens
  Table 3 sequence identifier: Q06830_C173
  MOD_RES (6)..(6): May or may not be conjugated to a chemical probe
KHGEVCPAGWKPGSDTIKPDVQKS

SEQ ID NO: 1183 - protein, 24 aa, Homo sapiens
  Table 3 sequence identifier: P06733_C389
  MOD_RES (18)..(18): May or may not be conjugated to a chemical probe
RSGETEDTFIADLVVGLCTGQIKT

SEQ ID NO: 1184 - protein, 26 aa, Homo sapiens
  Table 3 sequence identifier: P28062_C120
  MOD_RES (16)..(16): May or may not be conjugated to a chemical probe
KVIEINPYLLGTMSGCAADCQYWERL

SEQ ID NO: 1185 - protein, 22 aa, Homo sapiens
  Table 3 sequence identifier: Q96B23_C57
  MOD_RES (15)..(15): May or may not be conjugated to a chemical probe
KDGVADSTVISSMPCLLMELRR

SEQ ID NO: 1186 - protein, 24 aa, Homo sapiens
  Table 3 sequence identifier: P05388_C119
  MOD_RES (8)..(8): May or may not be conjugated to a chemical probe
RAGAIAPCEVTVPAQNTGLGPEKT

SEQ ID NO: 1187 - protein, 23 aa, Homo sapiens
  Table 3 sequence identifier: Q14353_C91
  MOD_RES (15)..(15): May or may not be conjugated to a chemical probe
KVQEAPIDEHWIIECNDGVFQRL

SEQ ID NO: 1188 - protein, 24 aa, Homo sapiens
  Table 3 sequence identifier: P11142_C17
  MOD_RES (15)..(15): May or may not be conjugated to a chemical probe
KGPAVGIDLGTTYSCVGVFQHGKV

SEQ ID NO: 1189 - protein, 15 aa, Homo sapiens
  Table 3 sequence identifier: Q9UI30_C33
  MOD_RES (3)..(3): May or may not be conjugated to a chemical probe
RICPVEFNPNFVARM

SEQ ID NO: 1190 - protein, 14 aa, Homo sapiens
  Table 3 sequence identifier: P27348_C94
  MOD_RES (4)..(4): May or may not be conjugated to a chemical probe
RSICTTVLELLDKY

SEQ ID NO: 1191 - protein, 24 aa, Homo sapiens
  Table 3 sequence identifier: P51812_C579
  MOD_RES (11)..(11): May or may not be conjugated to a chemical probe
RAENGLLMTPCYTANFVAPEVLKR

SEQ ID NO: 1192 - protein, 27 aa, Homo sapiens
  Table 3 sequence identifier: P62304_C46
  MOD_RES (5)..(5): May or may not be conjugated to a chemical probe
RIEGCIIGFDEYMNLVLDDAEEIHSKT

SEQ ID NO: 1193 - protein, 21 aa, Homo sapiens
  Table 3 sequence identifier: P67936_C247
  MOD_RES (20)..(20): May or may not be conjugated to a chemical probe
KEENVGLHQTLDQTLNELNCI

SEQ ID NO: 1194 - protein, 27 aa, Homo sapiens
  Table 3 sequence identifier: Q9H3P7_C129
  MOD_RES (13)..(13): May or may not be conjugated to a chemical probe
KQVLMGPYNPDTCPEVGFFDVLGNDRR

SEQ ID NO: 1195 - protein, 18 aa, Homo sapiens
  Table 3 sequence identifier: P49589_C27
  MOD_RES (16)..(16): May or may not be conjugated to a chemical probe
RRVQPQWSPPAGTQPCRL

SEQ ID NO: 1196 - protein, 27 aa, Homo sapiens
  Table 3 sequence identifier: Q9BY32_C146
  MOD_RES (3)..(3): May or may not be conjugated to a chemical probe
RGCQDFGWDPCFQPDGYEQTYAEMPKA

SEQ ID NO: 1197 - protein, 10 aa, Homo sapiens
  Table 3 sequence identifier: P25205_C360
  MOD_RES (5)..(5): May or may not be conjugated to a chemical probe
RYVLCTAPRA

SEQ ID NO: 1198 - protein, 10 aa, Homo sapiens
  Table 3 sequence identifier: Q96GX9_C147
  MOD_RES (2)..(2): May or may not be conjugated to a chemical probe
KCTSGGYYRY

SEQ ID NO: 1199 - protein, 23 aa, Homo sapiens
  Table 3 sequence identifier: P18669_C153
  MOD_RES (13)..(13): May or may not be conjugated to a chemical probe
RYADLTEDQLPSCESLKDTIARA

SEQ ID NO: 1200 - protein, 9 aa, Homo sapiens
  Table 3 sequence identifier: O75390_C211
  MOD_RES (4)..(4): May or may not be conjugated to a chemical probe
KLPCVAAKI

SEQ ID NO: 1201 - protein, 17 aa, Homo sapiens
  Table 3 sequence identifier: Q16555_C504
  MOD_RES (9)..(9): May or may not be conjugated to a chemical probe
RGLYDGPVCEVSVTPKT

SEQ ID NO: 1202 - protein, 14 aa, Homo sapiens
  Table 3 sequence identifier: P62993_C32
  MOD_RES (7)..(7): May or may not be conjugated to a chemical probe
KVLNEECDQNWYKA

SEQ ID NO: 1203 - protein, 20 aa, Homo sapiens
  Table 3 sequence identifier: P63104_C94
  MOD_RES (10)..(10): May or may not be conjugated to a chemical probe
KIETELRDICNDVLSLLEKF

SEQ ID NO: 1204 - protein, 33 aa, Homo sapiens
  Table 3 sequence identifier: B0V043_C112
  MOD_RES (22)..(22): May or may not be conjugated to a chemical probe
RAAVLVQQWVSYADTELIPAACGATLPALGLRS

SEQ ID NO: 1205 - protein, 12 aa, Homo sapiens
  Table 3 sequence identifier: P62937_C161
  MOD_RES (8)..(8): May or may not be conjugated to a chemical probe
KKITIADCGQLE

SEQ ID NO: 1206 - protein, 37 aa, Homo sapiens
  Table 3 sequence identifier: Q8N806_C35
  MOD_RES (26)..(26): May or may not be conjugated to a chemical probe
RQSELEPVVSLVDVLEEDEELENEACAVLGGSDSEKC

SEQ ID NO: 1207 - protein, 22 aa, Homo sapiens
  Table 3 sequence identifier: P10768_C56
  MOD_RES (13)..(13): May or may not be conjugated to a chemical probe
KCPALYWLSGLTCTEQNFISKS

SEQ ID NO: 1208 - protein, 17 aa, Homo sapiens
  Table 3 sequence identifier: Q16630_C159
  MOD_RES (14)..(14): May or may not be conjugated to a chemical probe
KRELHGQNPVVTPCNKQ

SEQ ID NO: 1209 - protein, 16 aa, Homo sapiens
  Table 3 sequence identifier: P47756_C147
  MOD_RES (3)..(3): May or may not be conjugated to a chemical probe
KGCWDSIHVVEVQEKS

SEQ ID NO: 1210 - protein, 12 aa, Homo sapiens
  Table 3 sequence identifier: Q9UMR2_C393
  MOD_RES (9)..(9): May or may not be conjugated to a chemical probe
KVLVTTNVCARG

SEQ ID NO: 1211 - protein, 19 aa, Homo sapiens
  Table 3 sequence identifier: P00558_C379
  MOD_RES (15)..(15): May or may not be conjugated to a chemical probe
RGCITIIGGGDTATCCAKW

SEQ ID NO: 1212 - protein, 18 aa, Homo sapiens
  Table 3 sequence identifier: Q9NZZ3_C20
  MOD_RES (10)..(10): May or may not be conjugated to a chemical probe
KAPPPSLTDCIGTVDSRA

SEQ ID NO: 1213 - protein, 16 aa, Homo sapiens
  Table 3 sequence identifier: P51610_C1886
  MOD_RES (3)..(3): May or may not be conjugated to a chemical probe
KTCLPGFPGAPCAIKI

SEQ ID NO: 1214 - protein, 12 aa, Homo sapiens
  Table 3 sequence identifier: P41250_C471
  MOD_RES (8)..(8): May or may not be conjugated to a chemical probe
RSCYDLSCHARA

SEQ ID NO: 1215 - protein, 11 aa, Homo sapiens
  Table 3 sequence identifier: O00299_C191
  MOD_RES (9)..(9): May or may not be conjugated to a chemical probe
KLHIVQVVCKK

SEQ ID NO: 1216 - protein, 16 aa, Homo sapiens
  Table 3 sequence identifier: Q9BV86_C195
  MOD_RES (4)..(4): May or may not be conjugated to a chemical probe
RIICSAGLSLLAEERQ

SEQ ID NO: 1217 - protein, 31 aa, Homo sapiens
  Table 3 sequence identifier: Q15369_C112
  MOD_RES (31)..(31): May or may not be conjugated to a chemical probe
RYTNSSTEIPEFPIAPEIALELLMAANFLDC

SEQ ID NO: 1218 - protein, 15 aa, Homo sapiens
  Table 3 sequence identifier: P14618_C49
  MOD_RES (7)..(7): May or may not be conjugated to a chemical probe
RNTGIICTIGPASRS

SEQ ID NO: 1219 - protein, 17 aa, Homo sapiens
  Table 3 sequence identifier: O43707_C499
  MOD_RES (3)..(3): May or may not be conjugated to a chemical probe
KICDQWDALGSLTHSRR

SEQ ID NO: 1220 - protein, 33 aa, Homo sapiens
  Table 3 sequence identifier: Q16576_C97
  MOD_RES (16)..(16): May or may not be conjugated to a chemical probe
RVHIPNDDAQFDASHCDSDKGEFGGFGSVTGKI

SEQ ID NO: 1221 - protein, 14 aa, Homo sapiens
  Table 3 sequence identifier: P28838_C462
  MOD_RES (6)..(6): May or may not be conjugated to a chemical probe
RSAGACTAAAFLKE

SEQ ID NO: 1222 - protein, 9 aa, Homo sapiens
  Table 3 sequence identifier: Q00839_C607
  MOD_RES (6)..(6): May or may not be conjugated to a chemical probe
KAVVVCPKD

SEQ ID NO: 1223 - protein, 11 aa, Homo sapiens
  Table 3 sequence identifier: O95861_C42
  MOD_RES (3)..(3): May or may not be conjugated to a chemical probe
KTCATDLQTKA

SEQ ID NO: 1224 - protein, 14 aa, Homo sapiens
  Table 3 sequence identifier: P40926_C212
  MOD_RES (10)..(10): May or may not be conjugated to a chemical probe
KTIIPLISQCTPKV

SEQ ID NO: 1225 - protein, 20 aa, Homo sapiens
  Table 3 sequence identifier: Q9Y2Z0_C62
  MOD_RES (12)..(12): May or may not be conjugated to a chemical probe
RAYCHILLGNYCVAVADAKK

SEQ ID NO: 1226 - protein, 35 aa, Homo sapiens
  Table 3 sequence identifier: O60828_C60
  MOD_RES (7)..(7): May or may not be conjugated to a chemical probe
KVFDPSCGLPYYWNADTDLVSWLSPHDPNSVVTKS

SEQ ID NO: 1227 - protein, 37 aa, Homo sapiens
  Table 3 sequence identifier: P09661_C89
  MOD_RES (12)..(12): May or may not be conjugated to a chemical probe
RIGEGLDQALPCLTELILTNNSLVELGDLDPLASLKS

SEQ ID NO: 1228 - protein, 33 aa, Homo sapiens
  Table 3 sequence identifier: P63279_C138
  MOD_RES (29)..(29): May or may not be conjugated to a chemical probe
KQILLGIQELLNEPNIQDPAQAEAYTIYCQNRV

SEQ ID NO: 1229 - protein, 14 aa, Homo sapiens
  Table 3 sequence identifier: P62258_C98
  MOD_RES (5)..(5): May or may not be conjugated to a chemical probe
KLICCDILDVLDKH

SEQ ID NO: 1230 - protein, 28 aa, Homo sapiens
  Table 3 sequence identifier: Q8WVJ2_C99
  MOD_RES (6)..(6): May or may not be conjugated to a chemical probe
RDAANCWTSLLESEYAADPWVQDQMQRK

SEQ ID NO: 1231 - protein, 18 aa, Homo sapiens
  Table 3 sequence identifier: Q15365_C158
  MOD_RES (15)..(15): May or may not be conjugated to a chemical probe
RAITIAGVPQSVTECVKQ

SEQ ID NO: 1232 - protein, 23 aa, Homo sapiens
  Table 3 sequence identifier: P07900_C597
  MOD_RES (7)..(7): May or may not be conjugated to a chemical probe
RLVTSPCCIVTSTYGWTANMERI

SEQ ID NO: 1233 - protein, 13 aa, Homo sapiens
  Table 3 sequence identifier: P21333_C1157
  MOD_RES (7)..(7): May or may not be conjugated to a chemical probe
KAHVVPCFDASKV

SEQ ID NO: 1234 - protein, 19 aa, Homo sapiens
  Table 3 sequence identifier: P14618_C326
  MOD_RES (8)..(8): May or may not be conjugated to a chemical probe
RAGKPVICATQMLESMIKK

SEQ ID NO: 1235 - protein, 35 aa, Homo sapiens
  Table 3 sequence identifier: Q13363_C134
  MOD_RES (27)..(27): May or may not be conjugated to a chemical probe
KSAGDLGIAVCNVPAASVEETADSTLCHILNLYRR

SEQ ID NO: 1236 - protein, 9 aa, Homo sapiens
  Table 3 sequence identifier: P48643_C181
  MOD_RES (6)..(6): May or may not be conjugated to a chemical probe
KVVNSCHRQ

SEQ ID NO: 1237 - protein, 22 aa, Homo sapiens
  Table 3 sequence identifier: P00338_C35
  MOD_RES (14)..(14): May or may not be conjugated to a chemical probe
KITVVGVGAVGMACAISILMKD

SEQ ID NO: 1238 - protein, 24 aa, Homo sapiens
  Table 3 sequence identifier: P25789_C107
  MOD_RES (12)..(12): May or may not be conjugated to a chemical probe
RYLLQYQEPIPCEQLVTALCDIKQ

SEQ ID NO: 1239 - protein, 23 aa, Homo sapiens
  Table 3 sequence identifier: P28838_C335
  MOD_RES (15)..(15): May or may not be conjugated to a chemical probe
KLNLPINIIGLAPLCENMPSGKA

SEQ ID NO: 1240 - protein, 27 aa, Homo sapiens
  Table 3 sequence identifier: P00558_C316
  MOD_RES (20)..(20): May or may not be conjugated to a chemical probe
KTGQATVASGIPAGWMGLDCGPESSKK

SEQ ID NO: 1241 - protein, 28 aa, Homo sapiens
  Table 3 sequence identifier: Q9BQ69_C186
  MOD_RES (24)..(24): May or may not be conjugated to a chemical probe
KLEVDAIVNAANSSLLGGGGVDGCIHRA

SEQ ID NO: 1242 - protein, 32 aa, Homo sapiens
  Table 3 sequence identifier: P23368_C120
  MOD_RES (23)..(23): May or may not be conjugated to a chemical probe
RILQDDIESLMPIVYTPTVGLACSQYGHIFRR

SEQ ID NO: 1243 - protein, 22 aa, Homo sapiens
  Table 3 sequence identifier: P07195_C36
  MOD_RES (14)..(14): May or may not be conjugated to a chemical probe
KITVVGVGQVGMACAISILGKS

SEQ ID NO: 1244 - protein, 12 aa, Homo sapiens
  Table 3 sequence identifier: Q92879_C150
  MOD_RES (3)..(3): May or may not be conjugated to a chemical probe
RGCAFVTFTTRA

SEQ ID NO: 1245 - protein, 15 aa, Homo sapiens
  Table 3 sequence identifier: Q9Y696_C100
  MOD_RES (11)..(11): May or may not be conjugated to a chemical probe
KIEEFLEEVLCPPKY

SEQ ID NO: 1246 - protein, 26 aa, Homo sapiens
  Table 3 sequence identifier: Q8NBF2_C716
  MOD_RES (18)..(18): May or may not be conjugated to a chemical probe
KAILFSQPLQITDTQQGCIAPVELRY

SEQ ID NO: 1247 - protein, 34 aa, Homo sapiens
  Table 3 sequence identifier: P24534_C50
  MOD_RES (29)..(29): May or may not be conjugated to a chemical probe
KSYIEGYVPSQADVAVFEAVSSPPPADLCHALRW

SEQ ID NO: 1248 - protein, 16 aa, Homo sapiens
  Table 3 sequence identifier: P46782_C155
  MOD_RES (11)..(11): May or may not be conjugated to a chemical probe
RRVNQAIWLLCTGARE

SEQ ID NO: 1249 - protein, 28 aa, Homo sapiens
  Table 3 sequence identifier: H3BQZ7_C57
  MOD_RES (26)..(26): May or may not be conjugated to a chemical probe
RLQEALDAEMLEDEAGGGGAGPGGACKA

SEQ ID NO: 1250 - protein, 21 aa, Homo sapiens
  Table 3 sequence identifier: Q93052_C364
  MOD_RES (13)..(13): May or may not be conjugated to a chemical probe
KKTYITDPVSAPCAPPLQPKG

SEQ ID NO: 1251 - protein, 9 aa, Homo sapiens
  Table 3 sequence identifier: P04075_C202
  MOD_RES (2)..(2): May or may not be conjugated to a chemical probe
RCQYVTEKV

SEQ ID NO: 1252 - protein, 18 aa, Homo sapiens
  Table 3 sequence identifier: Q7KZF4_C560
  MOD_RES (15)..(15): May or may not be conjugated to a chemical probe
KETCLITFLLAGIECPRG

SEQ ID NO: 1253 - protein, 27 aa, Homo sapiens
  Table 3 sequence identifier: P40227_C406
  MOD_RES (8)..(8): May or may not be conjugated to a chemical probe
KNAIDDGCVVPGAGAVEVAMAEALIKH

SEQ ID NO: 1254 - protein, 15 aa, Homo sapiens
  Table 3 sequence identifier: P60174_C255
  MOD_RES (13)..(13): May or may not be conjugated to a chemical probe
RIIYGGSVTGATCKE

SEQ ID NO: 1255 - protein, 25 aa, Homo sapiens
  Table 3 sequence identifier: Q08J23_C321
  MOD_RES (7)..(7): May or may not be conjugated to a chemical probe
RMVYSTCSLNPIEDEAVIASLLEKS

SEQ ID NO: 1256 - protein, 16 aa, Homo sapiens
  Table 3 sequence identifier: P15927_C219
  MOD_RES (3)..(3): May or may not be conjugated to a chemical probe
KACPRPEGLNFQDLKN

SEQ ID NO: 1257 - protein, 35 aa, Homo sapiens
  Table 3 sequence identifier: P09622_C477
  MOD_RES (29)..(29): May or may not be conjugated to a chemical probe
RVLGAHILGPGAGEMVNEAALALEYGASCEDIARV

SEQ ID NO: 1258 - protein, 18 aa, Homo sapiens
  Table 3 sequence identifier: P28838_C376
  MOD_RES (9)..(9): May or may not be conjugated to a chemical probe
RLILADALCYAHTFNPKV

SEQ ID NO: 1259 - protein, 11 aa, Homo sapiens
  Table 3 sequence identifier: P49915_C523
  MOD_RES (9)..(9): May or may not be conjugated to a chemical probe
KTVGVQGDCRS

SEQ ID NO: 1260 - protein, 13 aa, Homo sapiens
  Table 3 sequence identifier: Q9H3H3_C222
  MOD_RES (5)..(5): May or may not be conjugated to a chemical probe
RWHLCPTLYESRF

SEQ ID NO: 1261 - protein, 11 aa, Homo sapiens
  Table 3 sequence identifier: P07737_C128
  MOD_RES (2)..(2): May or may not be conjugated to a chemical probe
KCYEMASHLRR

SEQ ID NO: 1262 - protein, 11 aa, Homo sapiens
  Table 3 sequence identifier: Q00839_C594
  MOD_RES (3)..(3): May or may not be conjugated to a chemical probe
KMCLFAGFQRK

SEQ ID NO: 1263 - protein, 33 aa, Homo sapiens
  Table 3 sequence identifier: Q14974_C455
  MOD_RES (22)..(22): May or may not be conjugated to a chemical probe
RICELLPEAAINDVYLAPLLQCLIEGLSAEPRV

SEQ ID NO: 1264 - protein, 18 aa, Homo sapiens
  Table 3 sequence identifier: O15067_C66
  MOD_RES (8)..(8): May or may not be conjugated to a chemical probe
KLMWLFGCPLLLDDVARE

SEQ ID NO: 1265 - protein, 10 aa, Homo sapiens
  Table 3 sequence identifier: Q01813_C112
  MOD_RES (4)..(4): May or may not be conjugated to a chemical probe
KAACNLLQRG

SEQ ID NO: 1266 - protein, 18 aa, Homo sapiens
  Table 3 sequence identifier: P11413_C385
  MOD_RES (16)..(16): May or may not be conjugated to a chemical probe
RLQFHDVAGDIFHQQCKR

SEQ ID NO: 1267 - protein, 30 aa, Homo sapiens
  Table 3 sequence identifier: Q13561_C240
  MOD_RES (2)..(2): May or may not be conjugated to a chemical probe
RCDQDAQNPLSAGLQGACLMETVELLQAKV

SEQ ID NO: 1268 - protein, 25 aa, Homo sapiens
  Table 3 sequence identifier: Q13162_C245
  MOD_RES (6)..(6): May or may not be conjugated to a chemical probe
KHGEVCPAGWKPGSETIIPDPAGKL

SEQ ID NO: 1269 - protein, 14 aa, Homo sapiens
  Table 3 sequence identifier: P50991_C252
  MOD_RES (8)..(8): May or may not be conjugated to a chemical probe
KIGLIQFCLSAPKT

SEQ ID NO: 1270 - protein, 26 aa, Homo sapiens
  Table 3 sequence identifier: P04899_C112
  MOD_RES (8)..(8): May or may not be conjugated to a chemical probe
RQLFALSCTAEEQGVLPDDLSGVIRR

SEQ ID NO: 1271 - protein, 12 aa, Homo sapiens
  Table 3 sequence identifier: O43765_C153
  MOD_RES (4)..(4): May or may not be conjugated to a chemical probe
RAICIDPAYSKA

SEQ ID NO: 1272 - protein, 30 aa, Homo sapiens
  Table 3 sequence identifier: P34932_C290
  MOD_RES (16)..(16): May or may not be conjugated to a chemical probe
KLMSANASDLPLSIECFMNDVDVSGTMNRG

SEQ ID NO: 1273 - protein, 15 aa, Homo sapiens
  Table 3 sequence identifier: P61247_C96
  MOD_RES (3)..(3): May or may not be conjugated to a chemical probe
KNCLTNFHGMDLTRD

SEQ ID NO: 1274 - protein, 20 aa, Homo sapiens
  Table 3 sequence identifier: P04075_C73
  MOD_RES (5)..(5): May or may not be conjugated to a chemical probe
RVNPCIGGVILFHETLYQKA

SEQ ID NO: 1275 - protein, 12 aa, Homo sapiens
  Table 3 sequence identifier: Q96EP5_C85
  MOD_RES (8)..(8): May or may not be conjugated to a chemical probe
RNIDPKPCTPRG

SEQ ID NO: 1276 - protein, 24 aa, Homo sapiens
  Table 3 sequence identifier: P27708_C1889
  MOD_RES (15)..(15): May or may not be conjugated to a chemical probe
KVAEPELMGTPDGTCYPPPPVPRQ

SEQ ID NO: 1277 - protein, 27 aa, Homo sapiens
  Table 3 sequence identifier: Q16822_C431
  MOD_RES (3)..(3): May or may not be conjugated to a chemical probe
RQCPIMDPAWEAPEGVPIDAIIFGGRR

SEQ ID NO: 1278 - protein, 12 aa, Homo sapiens
  Table 3 sequence identifier: Q96KB5_C70
  MOD_RES (6)..(6): May or may not be conjugated to a chemical probe
KINPICNDHYRS

SEQ ID NO: 1279 - protein, 19 aa, Homo sapiens
  Table 3 sequence identifier: P00558_C108
  MOD_RES (3)..(3): May or may not be conjugated to a chemical probe
KACANPAAGSVILLENLRF

SEQ ID NO: 1280 - protein, 31 aa, Homo sapiens
  Table 3 sequence identifier: Q15365_C293
  MOD_RES (26)..(26): May or may not be conjugated to a chemical probe
KGYWASLDASTQTTHELTIPNNLIGCIIGRQ

SEQ ID NO: 1281 - protein, 20 aa, Homo sapiens
  Table 3 sequence identifier: P60174_C164
  MOD_RES (15)..(15): May or may not be conjugated to a chemical probe
KVAHALAEGLGVIACIGEKL

SEQ ID NO: 1282 - protein, 19 aa, Homo sapiens
  Table 3 sequence identifier: P62826_C120
  MOD_RES (11)..(11): May or may not be conjugated to a chemical probe
RVCENIPIVLCGNKVDIKD

SEQ ID NO: 1283 - protein, 11 aa, Homo sapiens
  Table 3 sequence identifier: O75348_C69
  MOD_RES (4)..(4): May or may not be conjugated to a chemical probe
RGSCSTEVEKE

SEQ ID NO: 1284 - protein, 35 aa, Homo sapiens
  Table 3 sequence identifier: Q9Y2D5_C296
  MOD_RES (25)..(25): May or may not be conjugated to a chemical probe
RAQQEQLLLQKQLQQQQQQPPSQLCTAPASSHERA

SEQ ID NO: 1285 - protein, 16 aa, Homo sapiens
  Table 3 sequence identifier: P61158_C12
  MOD_RES (9)..(9): May or may not be conjugated to a chemical probe
RLPACVVDCGTGYTKL

SEQ ID NO: 1286 - protein, 31 aa, Homo sapiens
  Table 3 sequence identifier: P36405_C118
  MOD_RES (21)..(21): May or may not be conjugated to a chemical probe
KRFEETGQELAELLEEEKLSCVPVLIFANKQ

SEQ ID NO: 1287 - protein, 29 aa, Homo sapiens
  Table 3 sequence identifier: P62937_C115
  MOD_RES (25)..(25): May or may not be conjugated to a chemical probe
KHTGPGILSMANAGPNTNGSQFFICTAKT

SEQ ID NO: 1288 - protein, 23 aa, Homo sapiens
  Table 3 sequence identifier: P35754_C83
  MOD_RES (7)..(7): May or may not be conjugated to a chemical probe
KDCIGGCSDLVSLQQSGELLTRL

SEQ ID NO: 1289 - protein, 27 aa, Homo sapiens
  Table 3 sequence identifier: O60664_C341
  MOD_RES (11)..(11): May or may not be conjugated to a chemical probe
RDIAQQLQATCTSLGSSIQGLPTNVKD

SEQ ID NO: 1290 - protein, 20 aa, Homo sapiens
  Table 3 sequence identifier: Q12874_C103
  MOD_RES (7)..(7): May or may not be conjugated to a chemical probe
KHPNEICVPMSVEFEELLKA

SEQ ID NO: 1291 - protein, 29 aa, Homo sapiens
  Table 3 sequence identifier: Q9H4M9_C138
  MOD_RES (4)..(4): May or may not be conjugated to a chemical probe
RFMCAQLPNPVLDSISIIDTPGILSGEKQ

SEQ ID NO: 1292 - protein, 9 aa, Homo sapiens
  Table 3 sequence identifier: Q15185_C76
  MOD_RES (6)..(6): May or may not be conjugated to a chemical probe
RSILCCLRK

SEQ ID NO: 1293 - protein, 32 aa, Homo sapiens
  Table 3 sequence identifier: P04632_C190
  MOD_RES (6)..(6): May or may not be conjugated to a chemical probe
RSGTICSSELPGAFEAAGFHLNEHLYNMIIRR

SEQ ID NO: 1294 - protein, 24 aa, Homo sapiens
  Table 3 sequence identifier: P13489_C75
  MOD_RES (12)..(12): May or may not be conjugated to a chemical probe
RSNELGDVGVHCVLQGLQTPSCKI

SEQ ID NO: 1295 - protein, 20 aa, Homo sapiens
  Table 3 sequence identifier: O95372_C213
  MOD_RES (11)..(11): May or may not be conjugated to a chemical probe
KTYPGVMHSSCPQEMAAVKE

SEQ ID NO: 1296 - protein, 16 aa, Homo sapiens
  Table 3 sequence identifier: P84085_C62
  MOD_RES (4)..(4): May or may not be conjugated to a chemical probe
KNICFTVWDVGGQDKI

SEQ ID NO: 1297 - protein, 10 aa, Homo sapiens
  Table 3 sequence identifier: P55786_C265
  MOD_RES (7)..(7): May or may not be conjugated to a chemical probe
RSKDGVCVRV

SEQ ID NO: 1298 - protein, 19 aa, Homo sapiens
  Table 3 sequence identifier: Q14204_C1977
  MOD_RES (12)..(12): May or may not be conjugated to a chemical probe
RMLSAVSQQVQCIQEALRE

SEQ ID NO: 1299 - protein, 11 aa, Homo sapiens
  Table 3 sequence identifier: P14866_C581
  MOD_RES (3)..(3): May or may not be conjugated to a chemical probe
KLCFSTAQHAS

SEQ ID NO: 1300 - protein, 25 aa, Homo sapiens
  Table 3 sequence identifier: Q14980_C160
  MOD_RES (8)..(8): May or may not be conjugated to a chemical probe
KAPVPSTCSSTFPEELSPPSHQAKR

SEQ ID NO: 1301 - protein, 24 aa, Homo sapiens
  Table 3 sequence identifier: O00743_C192
  MOD_RES (5)..(5): May or may not be conjugated to a chemical probe
KGAFCDLVWSDPEDVDTWAISPRG

SEQ ID NO: 1302 - protein, 22 aa, Homo sapiens
  Table 3 sequence identifier: P07741_C83
  MOD_RES (17)..(17): May or may not be conjugated to a chemical probe
RGFLFGPSLAQELGLGCVLIRK

SEQ ID NO: 1303 - protein, 23 aa, Homo sapiens
  Table 3 sequence identifier: O75607_C105
  MOD_RES (4)..(4): May or may not be conjugated to a chemical probe
KLSCQPMLSLDDFQLQPPVTFRL

SEQ ID NO: 1304 - protein, 14 aa, Homo sapiens
  Table 3 sequence identifier: P09429_C23
  MOD_RES (12)..(12): May or may not be conjugated to a chemical probe
KMSSYAFFVQTCRE

SEQ ID NO: 1305 - protein, 23 aa, Homo sapiens
  Table 3 sequence identifier: P26641_C339
  MOD_RES (13)..(13): May or may not be conjugated to a chemical probe
RFPEELTQTFMSCNLITGMFQRL

SEQ ID NO: 1306 - protein, 29 aa, Homo sapiens
  Table 3 sequence identifier: O60232_C152
  MOD_RES (20)..(20): May or may not be conjugated to a chemical probe
KAAQGPPAPAVPPNTDVMACTQTALLQKL

SEQ ID NO: 1307 - protein, 21 aa, Homo sapiens
  Table 3 sequence identifier: Q66K74_C342
  MOD_RES (15)..(15): May or may not be conjugated to a chemical probe
RLISPNLGVVFFNACEAASRL

SEQ ID NO: 1308 - protein, 16 aa, Homo sapiens
  Table 3 sequence identifier: Q52LJ0_C63
  MOD_RES (4)..(4): May or may not be conjugated to a chemical probe
KSLCNLEESITSAGRD

SEQ ID NO: 1309 - protein, 11 aa, Homo sapiens
  Table 3 sequence identifier: P62249_C25
  MOD_RES (9)..(9): May or may not be conjugated to a chemical probe
KTATAVAHCKR

SEQ ID NO: 1310 - protein, 16 aa, Homo sapiens
  Table 3 sequence identifier: P35579_C988
  MOD_RES (14)..(14): May or may not be conjugated to a chemical probe
KLEEEQIILEDQNCKL

SEQ ID NO: 1311 - protein, 10 aa, Homo sapiens
  Table 3 sequence identifier: P33316_C222
  MOD_RES (7)..(7): May or may not be conjugated to a chemical probe
RIAQLICERI

SEQ ID NO: 1312 - protein, 33 aa, Homo sapiens
  Table 3 sequence identifier: Q9Y6E0_C89
  MOD_RES (25)..(25): May or may not be conjugated to a chemical probe
KIIDLEEAEDEIEDIQQEITVLSQCDSPYVTKY

SEQ ID NO: 1313 - protein, 20 aa, Homo sapiens
  Table 3 sequence identifier: P49411_C222
  MOD_RES (14)..(14): May or may not be conjugated to a chemical probe
KGEETPVIVGSALCALEGRD

SEQ ID NO: 1314 - protein, 17 aa, Homo sapiens
  Table 3 sequence identifier: Q01813_C360
  MOD_RES (7)..(7): May or may not be conjugated to a chemical probe
RLPLMECVQMTQDVQKA

SEQ ID NO: 1315 - protein, 38 aa, Homo sapiens
  Table 3 sequence identifier: Q7L2J0_C177
  MOD_RES (7)..(7): May or may not be conjugated to a chemical probe
RRVNSDCDSVLPSNFLLGGNIFDPLNLNSLLDEEVSRT

SEQ ID NO: 1316 - protein, 9 aa, Homo sapiens
  Table 3 sequence identifier: O15355_C164
  MOD_RES (6)..(6): May or may not be conjugated to a chemical probe
RYGQNCHKG

SEQ ID NO: 1317 - protein, 18 aa, Homo sapiens
  Table 3 sequence identifier: Q6IBS0_C141
  MOD_RES (6)..(6): May or may not be conjugated to a chemical probe
KHLSSCAAPAPLTSAERE

SEQ ID NO: 1318 - protein, 18 aa, Homo sapiens
  Table 3 sequence identifier: Q9NVG8_C387
  MOD_RES (12)..(12): May or may not be conjugated to a chemical probe
RLLQDYPITDVCQILQKA

SEQ ID NO: 1319 - protein, 20 aa, Homo sapiens
  Table 3 sequence identifier: O15382_C342
  MOD_RES (12)..(12): May or may not be conjugated to a chemical probe
RVREVFGSGTACQVCPVHRI

SEQ ID NO: 1320 - protein, 23 aa, Homo sapiens
  Table 3 sequence identifier: P12004_C135
  MOD_RES (19)..(19): May or may not be conjugated to a chemical probe
KLMDLDVEQLGIPEQEYSCVVKM

SEQ ID NO: 1321 - protein, 13 aa, Homo sapiens
  Table 3 sequence identifier: P60660_C32
  MOD_RES (7)..(7): May or may not be conjugated to a chemical probe
KILYSQCGDVMRA

SEQ ID NO: 1322 - protein, 14 aa, Homo sapiens
  Table 3 sequence identifier: P55072_C522
  MOD_RES (11)..(11): May or may not be conjugated to a chemical probe
KGVLFYGPPGCGKT

SEQ ID NO: 1323 - protein, 34 aa, Homo sapiens
  Table 3 sequence identifier: Q99439_C240
  MOD_RES (7)..(7): May or may not be conjugated to a chemical probe
KLGTDKCDNSSMSLQMGYTQGANQSGQVFGLGRQ

SEQ ID NO: 1324 - protein, 13 aa, Homo sapiens
  Table 3 sequence identifier: P05455_C245
  MOD_RES (11)..(11): May or may not be conjugated to a chemical probe
KFSGDLDDQTCRE

SEQ ID NO: 1325 - protein, 13 aa, Homo sapiens
  Table 3 sequence identifier: O75131_C54
  MOD_RES (5)..(5): May or may not be conjugated to a chemical probe
RIKNCLNPQFSKT

SEQ ID NO: 1326 - protein, 11 aa, Homo sapiens
  Table 3 sequence identifier: P26358_C62
  MOD_RES (5)..(5): May or may not be conjugated to a chemical probe
KNQLCDLETKL

SEQ ID NO: 1327 - protein, 18 aa, Homo sapiens
  Table 3 sequence identifier: Q7Z4W1_C138
  MOD_RES (14)..(14): May or may not be conjugated to a chemical probe
RGVPGAIVNVSSQCSQRA

SEQ ID NO: 1328 - protein, 18 aa, Homo sapiens
  Table 3 sequence identifier: P10809_C447
  MOD_RES (2)..(2): May or may not be conjugated to a chemical probe
RCIPALDSLTPANEDQKI

SEQ ID NO: 1329 - protein, 31 aa, Homo sapiens
  Table 3 sequence identifier: P84077_C159
  MOD_RES (11)..(11): May or may not be conjugated to a chemical probe
RHRNWYIQATCATSGDGLYEGLDWLSNQLRN

SEQ ID NO: 1330 - protein, 15 aa, Homo sapiens
  Table 3 sequence identifier: Q15185_C40
  MOD_RES (6)..(6): May or may not be conjugated to a chemical probe
KLTFSCLGGSDNFKH

SEQ ID NO: 1331 - protein, 18 aa, Homo sapiens
  Table 3 sequence identifier: Q16854_C87
  MOD_RES (3)..(3): May or may not be conjugated to a chemical probe
KACTAQSLGNLLDMMYRE

SEQ ID NO: 1332 - protein, 22 aa, Homo sapiens
  Table 3 sequence identifier: Q9Y508_C8
  MOD_RES (3)..(3): May or may not be conjugated to a chemical probe
RDCGGAAQLAGPAAEADPLGRF

SEQ ID NO: 1333 - protein, 10 aa, Homo sapiens
  Table 3 sequence identifier: P63208_C120
  MOD_RES (8)..(8): May or may not be conjugated to a chemical probe
KGLLDVTCKT

SEQ ID NO: 1334 - protein, 14 aa, Homo sapiens
  Table 3 sequence identifier: O00148_C164
  MOD_RES (3)..(3): May or may not be conjugated to a chemical probe
KNCPHVVVGTPGRI

SEQ ID NO: 1335 - protein, 34 aa, Homo sapiens
  Table 3 sequence identifier: P25786_C148
  MOD_RES (24)..(24): May or may not be conjugated to a chemical probe
RRPYGVGLLIAGYDDMGPHIFQTCPSANYFDCRA

SEQ ID NO: 1336 - protein, 9 aa, Homo sapiens
  Table 3 sequence identifier: P61221_C88
  MOD_RES (3)..(3): May or may not be conjugated to a chemical probe
RYCANAFKL

SEQ ID NO: 1337 - protein, 10 aa, Homo sapiens
  Table 3 sequence identifier: O60664_C60
  MOD_RES (4)..(4): May or may not be conjugated to a chemical probe
KTVCDAAEKG

SEQ ID NO: 1338 - protein, 28 aa, Homo sapiens
  Table 3 sequence identifier: P15311_C117
  MOD_RES (11)..(11): May or may not be conjugated to a chemical probe
KEGILSDEIYCPPETAVLLGSYAVQAKF

SEQ ID NO: 1339 - protein, 16 aa, Homo sapiens
  Table 3 sequence identifier: Q9UBW8_C110
  MOD_RES (2)..(2): May or may not be conjugated to a chemical probe
KCIPYAVLLEALALRN

SEQ ID NO: 1340 - protein, 29 aa, Homo sapiens
  Table 3 sequence identifier: P42765_C287
  MOD_RES (10)..(10): May or may not be conjugated to a chemical probe
RIVGYFVSGCDPSIMGIGPVPAISGALKK

SEQ ID NO: 1341 - protein, 11 aa, Homo sapiens
  Table 3 sequence identifier: Q99832_C158
  MOD_RES (2)..(2): May or may not be conjugated to a chemical probe
KCAMTALSSKL

SEQ ID NO: 1342 - protein, 11 aa, Homo sapiens
  Table 3 sequence identifier: P61978_C145
  MOD_RES (7)..(7): May or may not be conjugated to a chemical probe
KGSDFDCELRL

SEQ ID NO: 1343 - protein, 11 aa, Homo sapiens
  Table 3 sequence identifier: Q13310_C132
  MOD_RES (4)..(4): May or may not be conjugated to a chemical probe
KVVCDENGSKG

SEQ ID NO: 1344 - protein, 13 aa, Homo sapiens
  Table 3 sequence identifier: P35998_C377
  MOD_RES (3)..(3): May or may not be conjugated to a chemical probe
RLCPNSTGAEIRS

SEQ ID NO: 1345 - protein, 18 aa, Homo sapiens
  Table 3 sequence identifier: P52789_C794
  MOD_RES (10)..(10): May or may not be conjugated to a chemical probe
KFLSQIESDCLALLQVRA

SEQ ID NO: 1346 - protein, 22 aa, Homo sapiens
  Table 3 sequence identifier: P35579_C91
  MOD_RES (10)..(10): May or may not be conjugated to a chemical probe
KVEDMAELTCLNEASVLHNLKE

SEQ ID NO: 1347 - protein, 23 aa, Homo sapiens
  Table 3 sequence identifier: P13995_C166
  MOD_RES (3)..(3): May or may not be conjugated to a chemical probe
RMCLDQYSMLPATPWGVWEIIKR

SEQ ID NO: 1348 - protein, 18 aa, Homo sapiens
  Table 3 sequence identifier: P22102_C41
  MOD_RES (14)..(14): May or may not be conjugated to a chemical probe
KQVLVAPGNAGTACSEKI

SEQ ID NO: 1349 - protein, 15 aa, Homo sapiens
  Table 3 sequence identifier: P0CW22_C35
  MOD_RES (4)..(4): May or may not be conjugated to a chemical probe
KRVCEEIAIIPSKKL

SEQ ID NO: 1350 - protein, 27 aa, Homo sapiens
  Table 3 sequence identifier: Q9UK45_C85
  MOD_RES (9)..(9): May or may not be conjugated to a chemical probe
RGTSVVLICPQDGMEAIPNPFIQQQDA

SEQ ID NO: 1351 - protein, 10 aa, Homo sapiens
  Table 3 sequence identifier: Q12874_C274
  MOD_RES (2)..(2): May or may not be conjugated to a chemical probe
KCGGTLEERA

SEQ ID NO: 1352 - protein, 19 aa, Homo sapiens
  Table 3 sequence identifier: P34897_C119
  MOD_RES (16)..(16): May or may not be conjugated to a chemical probe
RYYGGAEVVDEIELLCQRR

SEQ ID NO: 1353 - protein, 12 aa, Homo sapiens
  Table 3 sequence identifier: P15153_C157
  MOD_RES (5)..(5): May or may not be conjugated to a chemical probe
KYLECSALTQRG

SEQ ID NO: 1354 - protein, 11 aa, Homo sapiens
  Table 3 sequence identifier: Q16186_C88
  MOD_RES (6)..(6): May or may not be conjugated to a chemical probe
KRVPQCPSGRV

SEQ ID NO: 1355 - protein, 25 aa, Homo sapiens
  Table 3 sequence identifier: P15531_C145
  MOD_RES (18)..(18): May or may not be conjugated to a chemical probe
KEIGLWFHPEELVDYTSCAQNWIYE

SEQ ID NO: 1356 - protein, 15 aa, Homo sapiens
  Table 3 sequence identifier: P49327_C2202
  MOD_RES (10)..(10): May or may not be conjugated to a chemical probe
KADEASELACPTPKE

SEQ ID NO: 1357 - protein, 12 aa, Homo sapiens
  Table 3 sequence identifier: P40926_C275
  MOD_RES (7)..(7): May or may not be conjugated to a chemical probe
KEGVVECSFVKS

SEQ ID NO: 1358 - protein, 34 aa, Homo sapiens
  Table 3 sequence identifier: P22314_C23
  MOD_RES (13)..(13): May or may not be conjugated to a chemical probe
RVSGPDPKPGSNCSPAQSVLSEVPSVPTNGMAKN

SEQ ID NO: 1359 - protein, 31 aa, Homo sapiens
  Table 3 sequence identifier: P52789_C517
  MOD_RES (8)..(8): May or may not be conjugated to a chemical probe
KMLPTYVCATPDGTEKGDFLALDLGGTNFRV

SEQ ID NO: 1360 - protein, 22 aa, Homo sapiens
  Table 3 sequence identifier: Q12931_C573
  MOD_RES (7)..(7): May or may not be conjugated to a chemical probe
RSPAAECLSEKETEELMAWMRN

SEQ ID NO: 1361 - protein, 18 aa, Homo sapiens
  Table 3 sequence identifier: P39687_C123
  MOD_RES (8)..(8): May or may not be conjugated to a chemical probe
KSLDLFNCEVTNLNDYRE

SEQ ID NO: 1362 - protein, 19 aa, Homo sapiens
  Table 3 sequence identifier: O43865_C272
  MOD_RES (6)..(6): May or may not be conjugated to a chemical probe
KAGKLCVPAMNVNDSVTKQ

SEQ ID NO: 1363 - protein, 9 aa, Homo sapiens
  Table 3 sequence identifier: O95456_C157
  MOD_RES (6)..(6): May or may not be conjugated to a chemical probe
KVFGSCPRK

SEQ ID NO: 1364 - protein, 19 aa, Homo sapiens
  Table 3 sequence identifier: P49005_C384
  MOD_RES (13)..(13): May or may not be conjugated to a chemical probe
RHISPTAPDTLGCYPFYKT

SEQ ID NO: 1365 - protein, 22 aa, Homo sapiens
  Table 3 sequence identifier: Q96EY8_C132
  MOD_RES (17)..(17): May or may not be conjugated to a chemical probe
KIQCTLQDVGSALATPCSSARE

SEQ ID NO: 1366 - protein, 27 aa, Homo sapiens
  Table 3 sequence identifier: P28074_C111
  MOD_RES (21)..(21): May or may not be conjugated to a chemical probe
KKVIEINPYLLGTMAGGAADCSFWERL

SEQ ID NO: 1367 - protein, 14 aa, Homo sapiens
  Table 3 sequence identifier: O75446_C184
  MOD_RES (10)..(10): May or may not be conjugated to a chemical probe
KAQLVEIVGCHFRS

SEQ ID NO: 1368 - protein, 14 aa, Homo sapiens
  Table 3 sequence identifier: P05388_C27
  MOD_RES (2)..(2): May or may not be conjugated to a chemical probe
KCFIVGADNVGSKQ

SEQ ID NO: 1369 - protein, 18 aa, Homo sapiens
  Table 3 sequence identifier: Q15366_C158
  MOD_RES (15)..(15): May or may not be conjugated to a chemical probe
RAITIAGIPQSIIECVKQ

SEQ ID NO: 1370 - protein, 14 aa, Homo sapiens
  Table 3 sequence identifier: O75369_C2501
  MOD_RES (7)..(7): May or may not be conjugated to a chemical probe
RSSTETCYSAIPKA

SEQ ID NO: 1371 - protein, 18 aa, Homo sapiens
  Table 3 sequence identifier: Q06124_C259
  MOD_RES (16)..(16): May or may not be conjugated to a chemical probe
KQGFWEEFETLQQQECKL

SEQ ID NO: 1372 - protein, 19 aa, Homo sapiens
  Table 3 sequence identifier: P40926_C285
  MOD_RES (7)..(7): May or may not be conjugated to a chemical probe
KSQETECTYFSTPLLLGKK

SEQ ID NO: 1373 - protein, 11 aa, Homo sapiens
  Table 3 sequence identifier: Q9BV79_C263
  MOD_RES (6)..(6): May or may not be conjugated to a chemical probe
RLALNCVGGKS

SEQ ID NO: 1374 - protein, 27 aa, Homo sapiens
  Table 3 sequence identifier: Q09666_C1900
  MOD_RES (22)..(22): May or may not be conjugated to a chemical probe
KLEGDLTGPSVGVEVPDVELECPDAKL

SEQ ID NO: 1375 - protein, 55 aa, Homo sapiens
  Table 3 sequence identifier: Q9UBB5_C359
  MOD_RES (53)..(53): May or may not be conjugated to a chemical probe
KGLQGVGPGSNDETLLSAVASALHTSSAPITGQVSAAVEKNPAVWLNTSQPLCKA

SEQ ID NO: 1376 - protein, 15 aa, Homo sapiens
  Table 3 sequence identifier: P32322_C262
  MOD_RES (12)..(12): May or may not be conjugated to a chemical probe
RSLLINAVEASCIRT

SEQ ID NO: 1377 - protein, 28 aa, Homo sapiens
  Table 3 sequence identifier: P31939_C241
  MOD_RES (17)..(17): May or may not be conjugated to a chemical probe
KLPITVLNGAPGFINLCDALNAWQLVKE

SEQ ID NO: 1378 - protein, 17 aa, Homo sapiens
  Table 3 sequence identifier: Q04917_C97
  MOD_RES (7)..(7): May or may not be conjugated to a chemical probe
KELETVCNDVLSLLDKF

SEQ ID NO: 1379 - protein, 19 aa, Homo sapiens
  Table 3 sequence identifier: P62753_C100
  MOD_RES (3)..(3): May or may not be conjugated to a chemical probe
RGCIVDANLSVLNLVIVKK

SEQ ID NO: 1380 - protein, 23 aa, Homo sapiens
  Table 3 sequence identifier: Q9Y490_C1353
  MOD_RES (14)..(14): May or may not be conjugated to a chemical probe
RAVTDSINQLITMCTQQAPGQKE

SEQ ID NO: 1381 - protein, 24 aa, Homo sapiens
  Table 3 sequence identifier: P52701_C615
  MOD_RES (6)..(6): May or may not be conjugated to a chemical probe
KSSLSCSLQEGLIPGSQFWDASKT

SEQ ID NO: 1382 - protein, 11 aa, Homo sapiens
  Table 3 sequence identifier: P49591_C300
  MOD_RES (8)..(8): May or may not be conjugated to a chemical probe
KYAGLSTCFRQ

SEQ ID NO: 1383 - protein, 17 aa, Homo sapiens
  Table 3 sequence identifier: P49411_C127
  MOD_RES (8)..(8): May or may not be conjugated to a chemical probe
RHYAHTDCPGHADYVKN

SEQ ID NO: 1384 - protein, 13 aa, Homo sapiens
  Table 3 sequence identifier: P51610_C227
  MOD_RES (11)..(11): May or may not be conjugated to a chemical probe
KLVIYGGMSGCRL

SEQ ID NO: 1385 - protein, 12 aa, Homo sapiens
  Table 3 sequence identifier: P60174_C104
  MOD_RES (9)..(9): May or may not be conjugated to a chemical probe
KIAVAAQNCYKV

SEQ ID NO: 1386 - protein, 26 aa, Homo sapiens
  Table 3 sequence identifier: Q12982_C295
  MOD_RES (23)..(23): May or may not be conjugated to a chemical probe
RYVFNLAELAELVPMEYVGIPECIKQ

SEQ ID NO: 1387 - protein, 26 aa, Homo sapiens
  Table 3 sequence identifier: Q9UHD8_C375
  MOD_RES (19)..(19): May or may not be conjugated to a chemical probe
KLTVIDTPGFGDHINNENCWQPIMKF

SEQ ID NO: 1388 - protein, 18 aa, Homo sapiens
  Table 3 sequence identifier: P53618_C888
  MOD_RES (7)..(7): May or may not be conjugated to a chemical probe
KALSGYCGFMAANLYARS

SEQ ID NO: 1389 - protein, 22 aa, Homo sapiens
  Table 3 sequence identifier: Q8N163_C644
  MOD_RES (9)..(9): May or may not be conjugated to a chemical probe
RGEASEDLCEMALDPELLLLRD

SEQ ID NO: 1390 - protein, 18 aa, Homo sapiens
  Table 3 sequence identifier: P61106_C40
  MOD_RES (6)..(6): May or may not be conjugated to a chemical probe
KFMADCPHTIGVEFGTRI

SEQ ID NO: 1391 - protein, 19 aa, Homo sapiens
  Table 3 sequence identifier: P21291_C167
  MOD_RES (17)..(17): May or may not be conjugated to a chemical probe
KGLESTTLADKDGEIYCKG

SEQ ID NO: 1392 - protein, 13 aa, Homo sapiens
  Table 3 sequence identifier: Q07020_C134
  MOD_RES (3)..(3): May or may not be conjugated to a chemical probe
KGCGTVLLSGPRK

SEQ ID NO: 1393 - protein, 36 aa, Homo sapiens
  Table 3 sequence identifier: Q86VP6_C413
  MOD_RES (11)..(11): May or may not be conjugated to a chemical probe
KQTRPVQSWLCDPDAMEQGETPLTMLQSQVPNIVKA

SEQ ID NO: 1394 - protein, 17 aa, Homo sapiens
  Table 3 sequence identifier: Q9Y3F4_C305
  MOD_RES (2)..(2): May or may not be conjugated to a chemical probe
KCVLPEEDSGELAKPKI

SEQ ID NO: 1395 - protein, 22 aa, Homo sapiens
  Table 3 sequence identifier: Q9Y5K6_C540
  MOD_RES (4)..(4): May or may not be conjugated to a chemical probe
KDTCYSPKPSVYLSTPSSASKA

SEQ ID NO: 1396 - protein, 10 aa, Homo sapiens
  Table 3 sequence identifier: O60361_C130
  MOD_RES (3)..(3): May or may not be conjugated to a chemical probe
KSCAHDWVYE

SEQ ID NO: 1397 - protein, 29 aa, Homo sapiens
  Table 3 sequence identifier: Q9BWD1_C65
  MOD_RES (22)..(22): May or may not be conjugated to a chemical probe
RATVAPEDVSEVIFGHVLAAGCGQNPVRQ

SEQ ID NO: 1398 - protein, 13 aa, Homo sapiens
  Table 3 sequence identifier: Q7L2J0_C522
  MOD_RES (3)..(3): May or may not be conjugated to a chemical probe
RSCFPASLTASRG

SEQ ID NO: 1399 - protein, 39 aa, Homo sapiens
  Table 3 sequence identifier: P61158_C307
  MOD_RES (33)..(33): May or may not be conjugated to a chemical probe
RFLGPEIFFHPEFANPDFTQPISEVVDEVIQNCPIDVRR

SEQ ID NO: 1400 - protein, 10 aa, Homo sapiens
  Table 3 sequence identifier: P11142_C603
  MOD_RES (3)..(3): May or may not be conjugated to a chemical probe
KVCNPIITKL

SEQ ID NO: 1401 - protein, 14 aa, Homo sapiens
  Table 3 sequence identifier: P13639_C728
  MOD_RES (2)..(2): May or may not be conjugated to a chemical probe
RCLYASVLTAQPRL

SEQ ID NO: 1402 - protein, 29 aa, Homo sapiens
  Table 3 sequence identifier: P04183_C206
  MOD_RES (15)..(15): May or may not be conjugated to a chemical probe
KASGQPAGPDNKENCPVPGKPGEAVAARK

SEQ ID NO: 1403 - protein, 9 aa, Homo sapiens
  Table 3 sequence identifier: P30153_C294
  MOD_RES (3)..(3): May or may not be conjugated to a chemical probe
KDCEAEVRA

SEQ ID NO: 1404 - protein, 27 aa, Homo sapiens
  Table 3 sequence identifier: Q09666_C2162
  MOD_RES (22)..(22): May or may not be conjugated to a chemical probe
KLEGDLTGPSVDVEVPDVELECPDAKL

SEQ ID NO: 1405 - protein, 10 aa, Homo sapiens
  Table 3 sequence identifier: P46779_C13
  MOD_RES (3)..(3): May or may not be conjugated to a chemical probe
RNCSSFLIKR

SEQ ID NO: 1406 - protein, 24 aa, Homo sapiens
  Table 3 sequence identifier: Q9Y696_C234
  MOD_RES (8)..(8): May or may not be conjugated to a chemical probe
RDEFTNTCPSDKEVEIAYSDVAKR

SEQ ID NO: 1407 - protein, 15 aa, Homo sapiens
  Table 3 sequence identifier: P08670_C328
  MOD_RES (8)..(8): May or may not be conjugated to a chemical probe
RQVQSLTCEVDALKG

SEQ ID NO: 1408 - protein, 15 aa, Homo sapiens
  Table 3 sequence identifier: O43684_C129
  MOD_RES (4)..(4): May or may not be conjugated to a chemical probe
RTPCNAGTFSQPEKV

SEQ ID NO: 1409 - protein, 12 aa, Homo sapiens
  Table 3 sequence identifier: Q04917_C112
  MOD_RES (3)..(3): May or may not be conjugated to a chemical probe
KNCNDFQYESKV

SEQ ID NO: 1410 - protein, 28 aa, Homo sapiens
  Table 3 sequence identifier: P41252_C526
  MOD_RES (8)..(8): May or may not be conjugated to a chemical probe
RISEVFDCWFESGSMPYAQVHYPFENKR

SEQ ID NO: 1411 - protein, 20 aa, Homo sapiens
  Table 3 sequence identifier: O14980_C1070
  MOD_RES (19)..(19): May or may not be conjugated to a chemical probe
RQMSVPGIFNPHEIPEEMCD

SEQ ID NO: 1412 - protein, 21 aa, Homo sapiens
  Table 3 sequence identifier: Q9Y3D5_C90
  MOD_RES (16)..(16): May or may not be conjugated to a chemical probe
KNVQLLSQFVSPFTGCIYGRH

SEQ ID NO: 1413 - protein, 11 aa, Homo sapiens
  Table 3 sequence identifier: Q15459_C244
  MOD_RES (8)..(8): May or may not be conjugated to a chemical probe
REVLDQVCYRV

SEQ ID NO: 1414 - protein, 27 aa, Homo sapiens
  Table 3 sequence identifier: P50552_C334
  MOD_RES (14)..(14): May or may not be conjugated to a chemical probe
KSSSSVTTSETQPCTPSSSDYSDLQRV

SEQ ID NO: 1415 - protein, 22 aa, Homo sapiens
  Table 3 sequence identifier: Q04637_C1265
  MOD_RES (6)..(6): May or may not be conjugated to a chemical probe
KEAVQCVQELASPSLLFIFVRH

SEQ ID NO: 1416 - protein, 28 aa, Homo sapiens
  Table 3 sequence identifier: Q12824_C147
  MOD_RES (21)..(21): May or may not be conjugated to a chemical probe
RNSQWVPTLPNSSHHLDAVPCSTTINRN

SEQ ID NO: 1417 - protein, 17 aa, Homo sapiens
  Table 3 sequence identifier: P78346_C87
  MOD_RES (12)..(12): May or may not be conjugated to a chemical probe
RLTIIVSDPSHCNVLRA

SEQ ID NO: 1418 - protein, 20 aa, Homo sapiens
  Table 3 sequence identifier: Q99460_C806
  MOD_RES (4)..(4): May or may not be conjugated to a chemical probe
KSNCKPSTFAYPAPLEVPKE

SEQ ID NO: 1419 - protein, 26 aa, Homo sapiens
  Table 3 sequence identifier: P46060_C573
  MOD_RES (21)..(21): May or may not be conjugated to a chemical probe
KALAPLLLAFVTKPNSALESCSFARH

SEQ ID NO: 1420 - protein, 15 aa, Homo sapiens
  Table 3 sequence identifier: Q6P1X6_C98
  MOD_RES (12)..(12): May or may not be conjugated to a chemical probe
RYEAAFPFLSPCGRE

SEQ ID NO: 1421 - protein, 14 aa, Homo sapiens
  Table 3 sequence identifier: P49189_C484
  MOD_RES (4)..(4): May or may not be conjugated to a chemical probe
KTVCVEMGDVESAF

SEQ ID NO: 1422 - protein, 16 aa, Homo sapiens
  Table 3 sequence identifier: Q9NVG8_C36
  MOD_RES (10)..(10): May or may not be conjugated to a chemical probe
RELSFSGIPCEGGLRC

SEQ ID NO: 1423 - protein, 10 aa, Homo sapiens
  Table 3 sequence identifier: P49841_C199
  MOD_RES (3)..(3): May or may not be conjugated to a chemical probe
KLCDFGSAKQ

SEQ ID NO: 1424 - protein, 21 aa, Homo sapiens
  Table 3 sequence identifier: Q09666_C1833
  MOD_RES (16)..(16): May or may not be conjugated to a chemical probe
KGPFVEAEVPDVDLECPDAKL

SEQ ID NO: 1425 - protein, 16 aa, Homo sapiens
  Table 3 sequence identifier: P62241_C182
  MOD_RES (13)..(13): May or may not be conjugated to a chemical probe
KLLACIASRPGQCGRA

SEQ ID NO: 1426 - protein, 12 aa, Homo sapiens
  Table 3 sequence identifier: Q13620_C787
  MOD_RES (9)..(9): May or may not be conjugated to a chemical probe
RRTLQSLACGKA

SEQ ID NO: 1427 - protein, 33 aa, Homo sapiens
  Table 3 sequence identifier: P26599_C23
  MOD_RES (10)..(10): May or may not be conjugated to a chemical probe
RGSDELFSTCVTNGPFIMSSNSASAANGNDSKK

SEQ ID NO: 1428 - protein, 27 aa, Homo sapiens
  Table 3 sequence identifier: Q14697_C502
  MOD_RES (10)..(10): May or may not be conjugated to a chemical probe
RDGSDYEGWCWPGSAGYPDFTNPTMRA

SEQ ID NO: 1429 - protein, 10 aa, Homo sapiens
  Table 3 sequence identifier: P08238_C564
  MOD_RES (8)..(8): May or may not be conjugated to a chemical probe
KAKFENLCKL

SEQ ID NO: 1430 - protein, 14 aa, Homo sapiens
  Table 3 sequence identifier: P53582_C14
  MOD_RES (8)..(8): May or may not be conjugated to a chemical probe
RVCETDGCSSEAKL

SEQ ID NO: 1431 - protein, 17 aa, Homo sapiens
  Table 3 sequence identifier: Q9UBT2_C30
  MOD_RES (12)..(12): May or may not be conjugated to a chemical probe
RVLVVGAGGIGCELLKN

SEQ ID NO: 1432 - protein, 17 aa, Homo sapiens
  Table 3 sequence identifier: P06733_C119
  MOD_RES (15)..(15): May or may not be conjugated to a chemical probe
KFGANAILGVSLAVCKA

SEQ ID NO: 1433 - protein, 18 aa, Homo sapiens
  Table 3 sequence identifier: P55884_C384
  MOD_RES (15)..(15): May or may not be conjugated to a chemical probe
RFSHQGVQLIDFSPCERY

SEQ ID NO: 1434 - protein, 24 aa, Homo sapiens
  Table 3 sequence identifier: P63167_C24
  MOD_RES (16)..(16): May or may not be conjugated to a chemical probe
KNADMSEEMQQDSVECATQALEKY

SEQ ID NO: 1435 - protein, 15 aa, Homo sapiens
  Table 3 sequence identifier: Q15417_C173
  MOD_RES (2)..(2): May or may not be conjugated to a chemical probe
KCASQAGMTAYGTRR

SEQ ID NO: 1436 - protein, 20 aa, Homo sapiens
  Table 3 sequence identifier: P21980_C230
  MOD_RES (9)..(9): May or may not be conjugated to a chemical probe
RVVSGMVNCNDDQGVLLGRW

SEQ ID NO: 1437 - protein, 10 aa, Homo sapiens
  Table 3 sequence identifier: P31943_C122
  MOD_RES (7)..(7): May or may not be conjugated to a chemical probe
RGLPFGCSKE

SEQ ID NO: 1438 - protein, 11 aa, Homo sapiens
  Table 3 sequence identifier: P31947_C38
  MOD_RES (7)..(7): May or may not be conjugated to a chemical probe
KGEELSCEERN

SEQ ID NO: 1439 - protein, 30 aa, Homo sapiens
  Table 3 sequence identifier: P18085_C159
  MOD_RES (9)..(9): May or may not be conjugated to a chemical probe
RTWYVQATCATQGTGLYEGLDWLSNELSKR

SEQ ID NO: 1440 - protein, 16 aa, Homo sapiens
  Table 3 sequence identifier: P60174_C124
  MOD_RES (3)..(3): May or may not be conjugated to a chemical probe
KDCGATWVVLGHSERR

SEQ ID NO: 1441 - protein, 13 aa, Homo sapiens
  Table 3 sequence identifier: P14618_C152
  MOD_RES (2)..(2): May or may not be conjugated to a chemical probe
KCDENILWLDYKN

SEQ ID NO: 1442 - protein, 19 aa, Homo sapiens
  Table 3 sequence identifier: Q12765_C324
  MOD_RES (6)..(6): May or may not be conjugated to a chemical probe
KTQSPCFGDDDPAKKEPRF

SEQ ID NO: 1443 - protein, 18 aa, Homo sapiens
  Table 3 sequence identifier: Q16555_C179
  MOD_RES (7)..(7): May or may not be conjugated to a chemical probe
RFQLTDCQIYEVLSVIRD

SEQ ID NO: 1444 - protein, 17 aa, Homo sapiens
  Table 3 sequence identifier: P35579_C1379
  MOD_RES (8)..(8): May or may not be conjugated to a chemical probe
KMEDSVGCLETAEEVKR

SEQ ID NO: 1445 - protein, 23 aa, Homo sapiens
  Table 3 sequence identifier: P07814_C92
  MOD_RES (5)..(5): May or may not be conjugated to a chemical probe
KLSSCDSFTSTINELNHCLSLRT

SEQ ID NO: 1446 - protein, 33 aa, Homo sapiens
  Table 3 sequence identifier: Q92597_C168
  MOD_RES (21)..(21): May or may not be conjugated to a chemical probe
RFALNNPEMVEGLVLINVNPCAEGWMDWAASKI

SEQ ID NO: 1447 - protein, 15 aa, Homo sapiens
  Table 3 sequence identifier: O43707_C351
  MOD_RES (2)..(2): May or may not be conjugated to a chemical probe
KCQLEINFNTLQTKL

SEQ ID NO: 1448 - protein, 15 aa, Homo sapiens
  Table 3 sequence identifier: Q7RTV0_C49
  MOD_RES (6)..(6): May or may not be conjugated to a chemical probe
RICDECNYGSYQGRC

SEQ ID NO: 1449 - protein, 15 aa, Homo sapiens
  Table 3 sequence identifier: P53396_C845
  MOD_RES (11)..(11): May or may not be conjugated to a chemical probe
RKPASFMTSICDERG

SEQ ID NO: 1450 - protein, 11 aa, Homo sapiens
  Table 3 sequence identifier: P17844_C234
  MOD_RES (8)..(8): May or may not be conjugated to a chemical probe
RLIDFLECGKT

SEQ ID NO: 1451 - protein, 13 aa, Homo sapiens
  Table 3 sequence identifier: Q9H0C8_C325
  MOD_RES (7)..(7): May or may not be conjugated to a chemical probe
RFILLACDGLFKV

SEQ ID NO: 1452 - protein, 17 aa, Homo sapiens
  Table 3 sequence identifier: P11413_C446
  MOD_RES (8)..(8): May or may not be conjugated to a chemical probe
RLILDVFCGSQMHFVRS

SEQ ID NO: 1453 - protein, 15 aa, Homo sapiens
  Table 3 sequence identifier: Q9BTT0_C87
  MOD_RES (2)..(2): May or may not be conjugated to a chemical probe
KCPNLTYLNLSGNKI

SEQ ID NO: 1454 - protein, 20 aa, Homo sapiens
  Table 3 sequence identifier: Q14258_C70
  MOD_RES (6)..(6): May or may not be conjugated to a chemical probe
KNTVLCNVVEQFLQADLARE

SEQ ID NO: 1455 - protein, 25 aa, Homo sapiens
  Table 3 sequence identifier: Q8WU79_C196
  MOD_RES (18)..(18): May or may not be conjugated to a chemical probe
KSTAPVMDLLGLDAPVACSIANSKT

SEQ ID NO: 1456 - protein, 39 aa, Homo sapiens
  Table 3 sequence identifier: Q92947_C289
  MOD_RES (33)..(33): May or may not be conjugated to a chemical probe
RASATGMIIMDGVEVPEENVLPGASSLGGPFGCLNNARY

SEQ ID NO: 1457 - protein, 9 aa, Homo sapiens
  Table 3 sequence identifier: P45974_C195
  MOD_RES (5)..(5): May or may not be conjugated to a chemical probe
RIPPCGWKC

SEQ ID NO: 1458 - protein, 23 aa, Homo sapiens
  Table 3 sequence identifier: Q9BXJ9_C817
  MOD_RES (21)..(21): May or may not be conjugated to a chemical probe
RNLQTCMEVLEALYDGSLGDCKE

SEQ ID NO: 1459 - protein, 31 aa, Homo sapiens
  Table 3 sequence identifier: P62330_C155
  MOD_RES (11)..(11): May or may not be conjugated to a chemical probe
RDRNWYVQPSCATSGDGLYEGLTWLTSNYKS

SEQ ID NO: 1460 - protein, 26 aa, Homo sapiens
  Table 3 sequence identifier: Q13501_C27
  MOD_RES (6)..(6): May or may not be conjugated to a chemical probe
RFSFCCSPEPEAEAEAAAGPGPCERL

SEQ ID NO: 1461 - protein, 10 aa, Homo sapiens
  Table 3 sequence identifier: Q5VWZ2_C12
  MOD_RES (2)..(2): May or may not be conjugated to a chemical probe
RCIVSPAGRH

SEQ ID NO: 1462 - protein, 14 aa, Homo sapiens
  Table 3 sequence identifier: Q04206_C105
  MOD_RES (10)..(10): May or may not be conjugated to a chemical probe
RDGFYEAELCPDRC

SEQ ID NO: 1463 - protein, 20 aa, Homo sapiens
  Table 3 sequence identifier: P36551_C198
  MOD_RES (15)..(15): May or may not be conjugated to a chemical probe
KEGGGGISCVLQDGCVFEKA

SEQ ID NO: 1464 - protein, 17 aa, Homo sapiens
  Table 3 sequence identifier: P25398_C69
  MOD_RES (7)..(7): May or may not be conjugated to a chemical probe
KLVEALCAEHQINLIKV

SEQ ID NO: 1465 - protein, 24 aa, Homo sapiens
  Table 3 sequence identifier: Q00839_C648
  MOD_RES (12)..(12): May or may not be conjugated to a chemical probe
KGNFTLPEVAECFDEITYVELQKE

SEQ ID NO: 1466 - protein, 36 aa, Homo sapiens
  Table 3 sequence identifier: P24752_C142
  MOD_RES (12)..(12): May or may not be conjugated to a chemical probe
KAIMMASQSLMCGHQDVMVAGGMESMSNVPYVMNRG

SEQ ID NO: 1467 - protein, 14 aa, Homo sapiens
  Table 3 sequence identifier: P02545_C522
  MOD_RES (8)..(8): May or may not be conjugated to a chemical probe
KAQNTWGCGNSLRT

SEQ ID NO: 1468 - protein, 23 aa, Homo sapiens
  Table 3 sequence identifier: O60763_C678
  MOD_RES (2)..(2): May or may not be conjugated to a chemical probe
KCQNEQLQTAVTQQVSQIQQHKD

SEQ ID NO: 1469 - protein, 17 aa, Homo sapiens
  Table 3 sequence identifier: P04637_C182
  MOD_RES (2)..(2): May or may not be conjugated to a chemical probe
RCSDSDGLAPPQHLIRV

SEQ ID NO: 1470 - protein, 9 aa, Homo sapiens
  Table 3 sequence identifier: Q9UHX1_C129
  MOD_RES (7)..(7): May or may not be conjugated to a chemical probe
RALAIMCRV

SEQ ID NO: 1471 - protein, 15 aa, Homo sapiens
  Table 3 sequence identifier: Q9Y383_C348
  MOD_RES (10)..(10): May or may not be conjugated to a chemical probe
RFRDQDLASCDRDRS

SEQ ID NO: 1472 - protein, 11 aa, Homo sapiens
  Table 3 sequence identifier: P78371_C289
  MOD_RES (6)..(6): May or may not be conjugated to a chemical probe
KHGINCFINRQ

SEQ ID NO: 1473 - protein, 11 aa, Homo sapiens
  Table 3 sequence identifier: Q15149_C4494
  MOD_RES (4)..(4): May or may not be conjugated to a chemical probe
KAFCGFEDPRT

SEQ ID NO: 1474 - protein, 20 aa, Homo sapiens
  Table 3 sequence identifier: P13639_C369
  MOD_RES (2)..(2): May or may not be conjugated to a chemical probe
RCELLYEGPPDDEAAMGIKS

SEQ ID NO: 1475 - protein, 13 aa, Homo sapiens
  Table 3 sequence identifier: P61163_C34
  MOD_RES (3)..(3): May or may not be conjugated to a chemical probe
KYCFPNYVGRPKH

SEQ ID NO: 1476 - protein, 21 aa, Homo sapiens
  Table 3 sequence identifier: Q7Z2W4_C645
  MOD_RES (18)..(18): May or may not be conjugated to a chemical probe
RKNSNVDSSYLESLYQSCPRG

SEQ ID NO: 1477 - protein, 21 aa, Homo sapiens
  Table 3 sequence identifier: P23526_C421
  MOD_RES (10)..(10): May or may not be conjugated to a chemical probe
KQAQYLGMSCDGPFKPDHYRY

SEQ ID NO: 1478 - protein, 14 aa, Homo sapiens
  Table 3 sequence identifier: Q9P2T1_C348
  MOD_RES (14)..(14): May or may not be conjugated to a chemical probe
RVTQQVNPIFSEAC

SEQ ID NO: 1479 - protein, 13 aa, Homo sapiens
  Table 3 sequence identifier: Q12849_C476
  MOD_RES (10)..(10): May or may not be conjugated to a chemical probe
RYIELFLNSCPKG

SEQ ID NO: 1480 - protein, 25 aa, Homo sapiens
  Table 3 sequence identifier: P07814_C744
  MOD_RES (12)..(12): May or may not be conjugated to a chemical probe
KERPTPSLNNNCTTSEDSLVLYNRV

SEQ ID NO: 1481 - protein, 19 aa, Homo sapiens
  Table 3 sequence identifier: Q9ULA0_C327
  MOD_RES (6)..(6): May or may not be conjugated to a chemical probe
RISASCQHPTAFEEAIPKS

SEQ ID NO: 1482 - protein, 28 aa, Homo sapiens
  Table 3 sequence identifier: Q01081_C67
  MOD_RES (2)..(2): May or may not be conjugated to a chemical probe
RCAVSDVEMQEHYDEFFEEVFTEMEEKY

SEQ ID NO: 1483 - protein, 21 aa, Homo sapiens
  Table 3 sequence identifier: P53041_C11
  MOD_RES (4)..(4): May or may not be conjugated to a chemical probe
RTECAEPPRDEPPADGALKRA

SEQ ID NO: 1484 - protein, 11 aa, Homo sapiens
  Table 3 sequence identifier: P63244_C138
  MOD_RES (9)..(9): May or may not be conjugated to a chemical probe
KLWNTLGVCKY

SEQ ID NO: 1485 - protein, 22 aa, Homo sapiens
  Table 3 sequence identifier: Q06323_C106
  MOD_RES (18)..(18): May or may not be conjugated to a chemical probe
KKKGEDEDKGPPCGPVNCNEKI

SEQ ID NO: 1486 - protein, 9 aa, Homo sapiens
  Table 3 sequence identifier: O95071_C730
  MOD_RES (5)..(5): May or may not be conjugated to a chemical probe
KVPDCFQRT

SEQ ID NO: 1487 - protein, 24 aa, Homo sapiens
  Table 3 sequence identifier: Q9H0D6_C736
  MOD_RES (16)..(16): May or may not be conjugated to a chemical probe
KFSLDEEAILPDQIVCSPVPMLRD

SEQ ID NO: 1488 - protein, 10 aa, Homo sapiens
  Table 3 sequence identifier: P00558_C50
  MOD_RES (3)..(3): May or may not be conjugated to a chemical probe
KFCLDNGAKS

SEQ ID NO: 1489 - protein, 10 aa, Homo sapiens
  Table 3 sequence identifier: P52272_C114
  MOD_RES (3)..(3): May or may not be conjugated to a chemical probe
RGCAVVEFKM

SEQ ID NO: 1490 - protein, 13 aa, Homo sapiens
  Table 3 sequence identifier: Q92598_C34
  MOD_RES (2)..(2): May or may not be conjugated to a chemical probe
RCTPSVISFGSKN

SEQ ID NO: 1491 - protein, 10 aa, Homo sapiens
  Table 3 sequence identifier: P51858_C12
  MOD_RES (2)..(2): May or may not be conjugated to a chemical probe
KCGDLVFAKM

SEQ ID NO: 1492 - protein, 24 aa, Homo sapiens
  Table 3 sequence identifier: Q9UBN7_C426
  MOD_RES (9)..(9): May or may not be conjugated to a chemical probe
RSAQASVSCALEALEPFWEVLVRS

SEQ ID NO: 1493 - protein, 8 aa, Homo sapiens
  Table 3 sequence identifier: P09234_C25
  MOD_RES (4)..(4): May or may not be conjugated to a chemical probe
KTHCSGRK

SEQ ID NO: 1494 - protein, 15 aa, Homo sapiens
  Table 3 sequence identifier: Q9P1F3_C39
  MOD_RES (2)..(2): May or may not be conjugated to a chemical probe
KCANLFEALVGTLKA

SEQ ID NO: 1495 - protein, 22 aa, Homo sapiens
  Table 3 sequence identifier: P61158_C34
  MOD_RES (17)..(17): May or may not be conjugated to a chemical probe
KLGYAGNTEPQFIIPSCIAIKE

SEQ ID NO: 1496 - protein, 40 aa, Homo sapiens
  Table 3 sequence identifier: P13639_C812
  MOD_RES (12)..(12): May or may not be conjugated to a chemical probe
RSNTGGQAFPQCVFDHWQILPGDPFDNSSRPSQVVAETRK

SEQ ID NO: 1497 - protein, 12 aa, Homo sapiens
  Table 3 sequence identifier: B0V043_C41
  MOD_RES (3)..(3): May or may not be conjugated to a chemical probe
RICLQPPPTSRT

SEQ ID NO: 1498 - protein, 16 aa, Homo sapiens
  Table 3 sequence identifier: Q9NQT5_C215
  MOD_RES (7)..(7): May or may not be conjugated to a chemical probe
KLLAPDCEIIQEVGKL

SEQ ID NO: 1499 - protein, 26 aa, Homo sapiens
  Table 3 sequence identifier: Q6PJG6_C539
  MOD_RES (2)..(2): May or may not be conjugated to a chemical probe
RCALLASEVPQLALQLLQDPESYVRA

SEQ ID NO: 1500 - protein, 11 aa, Homo sapiens
  Table 3 sequence identifier: H3BN98_C196
  MOD_RES (8)..(8): May or may not be conjugated to a chemical probe
RQVLIRPCSKV

SEQ ID NO: 1501 - protein, 14 aa, Homo sapiens
  Table 3 sequence identifier: P35998_C389
  MOD_RES (4)..(4): May or may not be conjugated to a chemical probe
RSVCTEAGMFAIRA

SEQ ID NO: 1502 - protein, 19 aa, Homo sapiens
  Table 3 sequence identifier: P41250_C616
  MOD_RES (2)..(2): May or may not be conjugated to a chemical probe
KCSVLPLSQNQEFMPFVKE

SEQ ID NO: 1503 - protein, 11 aa, Homo sapiens
  Table 3 sequence identifier: Q9Y5Y2_C269
  MOD_RES (9)..(9): May or may not be conjugated to a chemical probe
KILDATPACLP

SEQ ID NO: 1504 - protein, 21 aa, Homo sapiens
  Table 3 sequence identifier: P31948_C26
  MOD_RES (14)..(14): May or may not be conjugated to a chemical probe
KALSVGNIDDALQCYSEAIKL

SEQ ID NO: 1505 - protein, 23 aa, Homo sapiens
  Table 3 sequence identifier: Q99575_C705
  MOD_RES (9)..(9): May or may not be conjugated to a chemical probe
KLGTLAPFCCPWEQLTQDWESRV

SEQ ID NO: 1506 - protein, 16 aa, Homo sapiens
  Table 3 sequence identifier: O00429_C470
  MOD_RES (12)..(12): May or may not be conjugated to a chemical probe
KLHDAIVEVVTCLLRK

SEQ ID NO: 1507 - protein, 22 aa, Homo sapiens
  Table 3 sequence identifier: O43264_C568
  MOD_RES (7)..(7): May or may not be conjugated to a chemical probe
RLAPILCDGTATFVDLVPGFRR

SEQ ID NO: 1508 - protein, 24 aa, Homo sapiens
  Table 3 sequence identifier: Q99961_C277
  MOD_RES (18)..(18): May or may not be conjugated to a chemical probe
REPFDLGEPEQSNGGFPCTTAPKI

SEQ ID NO: 1509 - protein, 11 aa, Homo sapiens
  Table 3 sequence identifier: Q99460_C898
  MOD_RES (9)..(9): May or may not be conjugated to a chemical probe
KVLTMPETCRY

SEQ ID NO: 1510 - protein, 14 aa, Homo sapiens
  Table 3 sequence identifier: P49411_C290
  MOD_RES (6)..(6): May or may not be conjugated to a chemical probe
KKGDECELLGHSKN

SEQ ID NO: 1511 - protein, 15 aa, Homo sapiens
  Table 3 sequence identifier: P21980_C370
  MOD_RES (7)..(7): May or may not be conjugated to a chemical probe
KSEGTYCCGPVPVRA

SEQ ID NO: 1512 - protein, 12 aa, Homo sapiens
  Table 3 sequence identifier: P21980_C545
  MOD_RES (6)..(6): May or may not be conjugated to a chemical probe
KSVPLCILYEKY

SEQ ID NO: 1513 - protein, 32 aa, Homo sapiens
  Table 3 sequence identifier: O00273_C154
  MOD_RES (23)..(23): May or may not be conjugated to a chemical probe
KEDLSSIILLSEEDLQMLVDAPCSDLAQELRQ

SEQ ID NO: 1514 - protein, 20 aa, Homo sapiens
  Table 3 sequence identifier: P09936_C152
  MOD_RES (18)..(18): May or may not be conjugated to a chemical probe
KNEAIQAAHDAVAQEGQCRV

SEQ ID NO: 1515 - protein, 20 aa, Homo sapiens
  Table 3 sequence identifier: Q66K74_C440
  MOD_RES (12)..(12): May or may not be conjugated to a chemical probe
RVLFPGCTPPACLLDGLVRL

SEQ ID NO: 1516 - protein, 20 aa, Homo sapiens
  Table 3 sequence identifier: Q9Y305_C155
  MOD_RES (18)..(18): May or may not be conjugated to a chemical probe
KMSPLSIVTALVDKIDMCKK

SEQ ID NO: 1517 - protein, 31 aa, Homo sapiens
  Table 3 sequence identifier: P17655_C105
  MOD_RES (12)..(12): May or may not be conjugated to a chemical probe
RTDICQGALGDCWLLAAIASLTLNEEILARV

SEQ ID NO: 1518 - protein, 18 aa, Homo sapiens
  Table 3 sequence identifier: P17655_C301
  MOD_RES (6)..(6): May or may not be conjugated to a chemical probe
RWNDNCPSWNTIDPEERE

SEQ ID NO: 1519 - protein, 18 aa, Homo sapiens
  Table 3 sequence identifier: P35611_C525
  MOD_RES (11)..(11): May or may not be conjugated to a chemical probe
KTAGPQSQVLCGVVMDRS

SEQ ID NO: 1520 - protein, 23 aa, Homo sapiens
  Table 3 sequence identifier: P14625_C645
  MOD_RES (7)..(7): May or may not be conjugated to a chemical probe
RLTESPCALVASQYGWSGNMERI

SEQ ID NO: 1521 - protein, 19 aa, Homo sapiens
  Table 3 sequence identifier: O95571_C34
  MOD_RES (9)..(9): May or may not be conjugated to a chemical probe
RQMFEPVSCTFTYLLGDRE

SEQ ID NO: 1522 - protein, 14 aa, Homo sapiens
  Table 3 sequence identifier: P62241_C100
  MOD_RES (3)..(3): May or may not be conjugated to a chemical probe
KNCIVLIDSTPYRQ

SEQ ID NO: 1523 - protein, 19 aa, Homo sapiens
  Table 3 sequence identifier: P22061_C95
  MOD_RES (15)..(15): May or may not be conjugated to a chemical probe
KALDVGSGSGILTACFARM

SEQ ID NO: 1524 - protein, 21 aa, Homo sapiens
  Table 3 sequence identifier: P19367_C813
  MOD_RES (13)..(13): May or may not be conjugated to a chemical probe
RAILQQLGLNSTCDDSILVKT

SEQ ID NO: 1525 - protein, 17 aa, Homo sapiens
  Table 3 sequence identifier: P20073_C363
  MOD_RES (8)..(8): May or may not be conjugated to a chemical probe
RLGTDESCFNMILATRS

SEQ ID NO: 1526 - protein, 34 aa, Homo sapiens
  Table 3 sequence identifier: O95486_C704
  MOD_RES (30)..(30): May or may not be conjugated to a chemical probe
KLALDCSGQQVAVDLFLLSGQYSDLASLGCISRY

SEQ ID NO: 1527 - protein, 23 aa, Homo sapiens
  Table 3 sequence identifier: P27816_C535
  MOD_RES (4)..(4): May or may not be conjugated to a chemical probe
KNVCLPPEMEVALTEDQVPALKT

SEQ ID NO: 1528 - protein, 9 aa, Homo sapiens
  Table 3 sequence identifier: Q08J23_C93
  MOD_RES (6)..(6): May or may not be conjugated to a chemical probe
KEILHCLKN

SEQ ID NO: 1529 - protein, 14 aa, Homo sapiens
  Table 3 sequence identifier: Q9NSD9_C195
  MOD_RES (6)..(6): May or may not be conjugated to a chemical probe
KEYTACELMNIYKT

SEQ ID NO: 1530 - protein, 27 aa, Homo sapiens
  Table 3 sequence identifier: Q9GZZ9_C250
  MOD_RES (5)..(5): May or may not be conjugated to a chemical probe
REGVCAASLPTTMGVVAGILVQNVLKF

SEQ ID NO: 1531 - protein, 12 aa, Homo sapiens
  Table 3 sequence identifier: P41240_C290
  MOD_RES (8)..(8): May or may not be conjugated to a chemical probe
RSVLGGDCLLKF

SEQ ID NO: 1532 - protein, 32 aa, Homo sapiens
  Table 3 sequence identifier: P00492_C23
  MOD_RES (20)..(20): May or may not be conjugated to a chemical probe
RSPGVVISDDEPGYDLDLFCIPNHYAEDLERV

SEQ ID NO: 1533 - protein, 29 aa, Homo sapiens
  Table 3 sequence identifier: Q99714_C58
  MOD_RES (7)..(7): May or may not be conjugated to a chemical probe
KKLGNNCVFAPADVTSEKDVQTALALAKG

SEQ ID NO: 1534 - protein, 21 aa, Homo sapiens
  Table 3 sequence identifier: P27707_C59
  MOD_RES (3)..(3): May or may not be conjugated to a chemical probe
RWCNVQSTQDEFEELTMSQKN

SEQ ID NO: 1535 - protein, 21 aa, Homo sapiens
  Table 3 sequence identifier: P19784_C336
  MOD_RES (7)..(7): May or may not be conjugated to a chemical probe
KEQSQPCADNAVLSSGLTAAR

SEQ ID NO: 1536 - protein, 13 aa, Homo sapiens
  Table 3 sequence identifier: P50914_C42
  MOD_RES (8)..(8): May or may not be conjugated to a chemical probe
RALVDGPCTQVRR

SEQ ID NO: 1537 - protein, 33 aa, Homo sapiens
  Table 3 sequence identifier: Q8WVJ2_C14
  MOD_RES (7)..(7): May or may not be conjugated to a chemical probe
RSGVVPCGTPWGQWYQTLEEVFIEVQVPPGTRA

SEQ ID NO: 1538 - protein, 10 aa, Homo sapiens
  Table 3 sequence identifier: Q02543_C22
  MOD_RES (2)..(2): May or may not be conjugated to a chemical probe
KCHTPPLYRM

SEQ ID NO: 1539 - protein, 23 aa, Homo sapiens
  Table 3 sequence identifier: Q6YN16_C218
  MOD_RES (21)..(21): May or may not be conjugated to a chemical probe
KTAIHTAAMDMLGGPGIESQCRK

SEQ ID NO: 1540 - protein, 22 aa, Homo sapiens
  Table 3 sequence identifier: Q9UHD8_C248
  MOD_RES (12)..(12): May or may not be conjugated to a chemical probe
RSQEATEAAPSCVGDMADTPRD

SEQ ID NO: 1541 - protein, 24 aa, Homo sapiens
  Table 3 sequence identifier: P22314_C1040
  MOD_RES (9)..(9): May or may not be conjugated to a chemical probe
RALVLELCCNDESGEDVEVPYVRY

SEQ ID NO: 1542 - protein, 13 aa, Homo sapiens
  Table 3 sequence identifier: Q15020_C670
  MOD_RES (2)..(2): May or may not be conjugated to a chemical probe
KCAAVDVEPPSKQ

SEQ ID NO: 1543 - protein, 11 aa, Homo sapiens
  Table 3 sequence identifier: O15144_C120
  MOD_RES (3)..(3): May or may not be conjugated to a chemical probe
RNCFASVFEKY

SEQ ID NO: 1544 - protein, 11 aa, Homo sapiens
  Table 3 sequence identifier: Q9UNM6_C357
  MOD_RES (6)..(6): May or may not be conjugated to a chemical probe
RLEFWCTDVKS

SEQ ID NO: 1545 - protein, 26 aa, Homo sapiens
  Table 3 sequence identifier: P30040_C157
  MOD_RES (12)..(12): May or may not be conjugated to a chemical probe
KGQGVYLGMPGCLPVYDALAGEFIRA

SEQ ID NO: 1546 - protein, 11 aa, Homo sapiens
  Table 3 sequence identifier: Q96Q11_C373
  MOD_RES (7)..(7): May or may not be conjugated to a chemical probe
KYQGEHCLLKE

SEQ ID NO: 1547 - protein, 24 aa, Homo sapiens
  Table 3 sequence identifier: Q02750_C277
  MOD_RES (9)..(9): May or may not be conjugated to a chemical probe
KELELMFGCQVEGDAAETPPRPRT

SEQ ID NO: 1548 - protein, 15 aa, Homo sapiens
  Table 3 sequence identifier: P27816_C635
  MOD_RES (2)..(2): May or may not be conjugated to a chemical probe
KCSLPAEEDSVLEKL

SEQ ID NO: 1549 - protein, 31 aa, Homo sapiens
  Table 3 sequence identifier: Q13185_C69
  MOD_RES (18)..(18): May or may not be conjugated to a chemical probe
KGFTDADNTWEPEENLDCPELIEAFLNSQKA

SEQ ID NO: 1550 - protein, 11 aa, Homo sapiens
  Table 3 sequence identifier: P21291_C40
  MOD_RES (9)..(9): May or may not be conjugated to a chemical probe
KSCFLCMVCKK

SEQ ID NO: 1551 - protein, 16 aa, Homo sapiens
  Table 3 sequence identifier: P55072_C535
  MOD_RES (7)..(7): May or may not be conjugated to a chemical probe
KAIANECQANFISIKG

SEQ ID NO: 1552 - protein, 19 aa, Homo sapiens
  Table 3 sequence identifier: P55072_C572
  MOD_RES (6)..(6): May or may not be conjugated to a chemical probe
RQAAPCVLFFDELDSIAKA

SEQ ID NO: 1553 - protein, 15 aa, Homo sapiens
  Table 3 sequence identifier: P39687_C87
  MOD_RES (2)..(2): May or may not be conjugated to a chemical probe
KCPNLTHLNLSGNKI

SEQ ID NO: 1554 - protein, 15 aa, Homo sapiens
  Table 3 sequence identifier: Q9Y314_C8
  MOD_RES (3)..(3): May or may not be conjugated to a chemical probe
KNCTAGAVYTYHEKK

SEQ ID NO: 1555 - protein, 10 aa, Homo sapiens
  Table 3 sequence identifier: Q9UBT2_C173
  MOD_RES (6)..(6): May or may not be conjugated to a chemical probe
RTFPGCTIRN

SEQ ID NO: 1556 - protein, 15 aa, Homo sapiens
  Table 3 sequence identifier: P34897_C91
  MOD_RES (10)..(10): May or may not be conjugated to a chemical probe
RAALEALGSCLNNKY

SEQ ID NO: 1557 - protein, 19 aa, Homo sapiens
  Table 3 sequence identifier: O00299_C178
  MOD_RES (13)..(13): May or may not be conjugated to a chemical probe
KFLDGNELTLADCNLLPKL

SEQ ID NO: 1558 - protein, 14 aa, Homo sapiens
  Table 3 sequence identifier: Q9Y570_C238
  MOD_RES (3)..(3): May or may not be conjugated to a chemical probe
KQCEGITSPEGSKS

SEQ ID NO: 1559 - protein, 8 aa, Homo sapiens
  Table 3 sequence identifier: P61927_C19
  MOD_RES (6)..(6): May or may not be conjugated to a chemical probe
KTHTLCRR

SEQ ID NO: 1560 - protein, 13 aa, Homo sapiens
  Table 3 sequence identifier: O75153_C1196
  MOD_RES (2)..(2): May or may not be conjugated to a chemical probe
KCLTQQAVALQRT

SEQ ID NO: 1561 - protein, 14 aa, Homo sapiens
  Table 3 sequence identifier: P23919_C31
  MOD_RES (8)..(8): May or may not be conjugated to a chemical probe
RKLVEALCAAGHRA

SEQ ID NO: 1562 - protein, 29 aa, Homo sapiens
  Table 3 sequence identifier: P40121_C290
  MOD_RES (26)..(26): May or may not be conjugated to a chemical probe
KVADSSPFALELLISDDCFVLDNGLCGKI

SEQ ID NO: 1563 - protein, 32 aa, Homo sapiens
  Table 3 sequence identifier: A0AVT1_C433
  MOD_RES (25)..(25): May or may not be conjugated to a chemical probe
KFSPLCQWLYLEAADIVESLGKPECEEFLPRG

SEQ ID NO: 1564 - protein, 39 aa, Homo sapiens
  Table 3 sequence identifier: Q15365_C201
  MOD_RES (2)..(2): May or may not be conjugated to a chemical probe
RCSDAAGYPHATHDLEGPPLDAYSIQGQHTISPLDLAKL

SEQ ID NO: 1565 - protein, 16 aa, Homo sapiens
  Table 3 sequence identifier: P29401_C386
  MOD_RES (6)..(6): May or may not be conjugated to a chemical probe
RTVPFCSTFAAFFTRA

SEQ ID NO: 1566 - protein, 19 aa, Homo sapiens
  Table 3 sequence identifier: P48147_C25
  MOD_RES (3)..(3): May or may not be conjugated to a chemical probe
KICDPYAWLEDPDSEQTKA

SEQ ID NO: 1567 - protein, 24 aa, Homo sapiens
  Table 3 sequence identifier: Q01813_C411
  MOD_RES (4)..(4): May or may not be conjugated to a chemical probe
KTNCNVAVINVGAPAAGMNAAVRS

SEQ ID NO: 1568 - protein, 21 aa, Homo sapiens
  Table 3 sequence identifier: P21333_C2543
  MOD_RES (4)..(4): May or may not be conjugated to a chemical probe
KATCAPQHGAPGPGPADASKV

SEQ ID NO: 1569 - protein, 11 aa, Homo sapiens
  Table 3 sequence identifier: P21333_C2601
  MOD_RES (4)..(4): May or may not be conjugated to a chemical probe
RTPCEEILVKH

SEQ ID NO: 1570 - protein, 11 aa, Homo sapiens
  Table 3 sequence identifier: O00154_C288
  MOD_RES (3)..(3): May or may not be conjugated to a chemical probe
KGCVITISGRM

SEQ ID NO: 1571 - protein, 11 aa, Homo sapiens
  Table 3 sequence identifier: P27635_C195
  MOD_RES (7)..(7): May or may not be conjugated to a chemical probe
RLIPDGCGVKY

SEQ ID NO: 1572 - protein, 28 aa, Homo sapiens
  Table 3 sequence identifier: P26038_C117
  MOD_RES (11)..(11): May or may not be conjugated to a chemical probe
KEGILNDDIYCPPETAVLLASYAVQSKY

SEQ ID NO: 1573 - protein, 19 aa, Homo sapiens
  Table 3 sequence identifier: Q96HE7_C208
  MOD_RES (11)..(11): May or may not be conjugated to a chemical probe
KIWNVIYEENCFKPQTIKR

SEQ ID NO: 1574 - protein, 16 aa, Homo sapiens
  Table 3 sequence identifier: P12814_C480
  MOD_RES (3)..(3): May or may not be conjugated to a chemical probe
KICDQWDNLGALTQKR

SEQ ID NO: 1575 - protein, 23 aa, Homo sapiens
  Table 3 sequence identifier: P07203_C202
  MOD_RES (22)..(22): May or may not be conjugated to a chemical probe
RRFQTIDIEPDIEALLSQGPSCA

SEQ ID NO: 1576 - protein, 18 aa, Homo sapiens
  Table 3 sequence identifier: Q99497_C46
  MOD_RES (15)..(15): May or may not be conjugated to a chemical probe
KVTVAGLAGKDPVQCSRD

SEQ ID NO: 1577 - protein, 11 aa, Homo sapiens
  Table 3 sequence identifier: Q9HAV4_C1131
  MOD_RES (9)..(9): May or may not be conjugated to a chemical probe
KDSLDQFDCKL

SEQ ID NO: 1578 - protein, 26 aa, Homo sapiens
  Table 3 sequence identifier: Q9UJX3_C131
  MOD_RES (17)..(17): May or may not be conjugated to a chemical probe
KVRPSTGNSASTPQSQCLPSEIEVKY

SEQ ID NO: 1579 - protein, 16 aa, Homo sapiens
  Table 3 sequence identifier: O75821_C139
  MOD_RES (6)..(6): May or may not be conjugated to a chemical probe
KEDLNCQEEEDPMNKL

SEQ ID NO: 1580 - protein, 8 aa, Homo sapiens
  Table 3 sequence identifier: P00338_C131
  MOD_RES (6)..(6): May or may not be conjugated to a chemical probe
KYSPNCKL

SEQ ID NO: 1581 - protein, 26 aa, Homo sapiens
  Table 3 sequence identifier: Q15102_C55
  MOD_RES (21)..(21): May or may not be conjugated to a chemical probe
KDKEPEVVFIGDSLVQLMHQCEIWRE

SEQ ID NO: 1582 - protein, 12 aa, Homo sapiens
  Table 3 sequence identifier: Q1KMD3_C308
  MOD_RES (4)..(4): May or may not be conjugated to a chemical probe
KEGCTEVSLLRV

SEQ ID NO: 1583 - protein, 12 aa, Homo sapiens
  Table 3 sequence identifier: P54886_C88
  MOD_RES (5)..(5): May or may not be conjugated to a chemical probe
RGDECGLALGRL

SEQ ID NO: 1584 - protein, 23 aa, Homo sapiens
  Table 3 sequence identifier: Q5VSL9_C798
  MOD_RES (14)..(14): May or may not be conjugated to a chemical probe
RAHSNPDFLPVDNCLQSVLGQRV

SEQ ID NO: 1585 - protein, 19 aa, Homo sapiens
  Table 3 sequence identifier: P30084_C213
  MOD_RES (3)..(3): May or may not be conjugated to a chemical probe
KICPVETLVEEAIQCAEKI

SEQ ID NO: 1586 - protein, 20 aa, Homo sapiens
  Table 3 sequence identifier: P30086_C168
  MOD_RES (8)..(8): May or may not be conjugated to a chemical probe
RAPVAGTCYQAEWDDYVPKL

SEQ ID NO: 1587 - protein, 23 aa, Homo sapiens
  Table 3 sequence identifier: Q9Y3D0_C158
  MOD_RES (18)..(18): May or may not be conjugated to a chemical probe
RVAAALENTHLLEVVNQCLSARS

SEQ ID NO: 1588 - protein, 25 aa, Homo sapiens
  Table 3 sequence identifier: P49589_C204
  MOD_RES (14)..(14): May or may not be conjugated to a chemical probe
KDLLSDWLDSTLGCDVTDNSIFSKL

SEQ ID NO: 1589 - protein, 48 aa, Homo sapiens
  Table 3 sequence identifier: Q15366_C217
  MOD_RES (19)..(19): May or may not be conjugated to a chemical probe
RYSTGSDSASFPHTTPSMCLNPDLEGPPLEAYTIQGQYAIPQPDLTKL

SEQ ID NO: 1590 - protein, 25 aa, Homo sapiens
  Table 3 sequence identifier: O75369_C2556
  MOD_RES (18)..(18): May or may not be conjugated to a chemical probe
KAGSNMLLIGVHGPTTPCEEVSMKH

SEQ ID NO: 1591 - protein, 38 aa, Homo sapiens
  Table 3 sequence identifier: Q16181_C126
  MOD_RES (26)..(26): May or may not be conjugated to a chemical probe
KEGGVQLLLTIVDTPGFGDAVDNSNCWQPVIDYIDSKF

SEQ ID NO: 1592 - protein, 20 aa, Homo sapiens
  Table 3 sequence identifier: Q99661_C245
  MOD_RES (6)..(6): May or may not be conjugated to a chemical probe
RATLECHPLTMTDPIEEHRI

SEQ ID NO: 1593 - protein, 10 aa, Homo sapiens
  Table 3 sequence identifier: Q9UHD1_C86
  MOD_RES (4)..(4): May or may not be conjugated to a chemical probe
KELCELKPKF

SEQ ID NO: 1594 - protein, 26 aa, Homo sapiens
  Table 3 sequence identifier: P0CB43_C368
  MOD_RES (24)..(24): May or may not be conjugated to a chemical probe
RGMENLLEVQVPEDVEQQLQQLDCRE

SEQ ID NO: 1595 - protein, 19 aa, Homo sapiens
  Table 3 sequence identifier: P40925_C137
  MOD_RES (13)..(13): May or may not be conjugated to a chemical probe
KVIVVGNPANTNCLTASKS

SEQ ID NO: 1596 - protein, 26 aa, Homo sapiens
  Table 3 sequence identifier: Q12888_C1933
  MOD_RES (2)..(2): May or may not be conjugated to a chemical probe
KCAEALQLPVVSQEWVIQCLIVGERI

SEQ ID NO: 1597 - protein, 11 aa, Homo sapiens
  Table 3 sequence identifier: Q14247_C112
  MOD_RES (3)..(3): May or may not be conjugated to a chemical probe
KHCSQVDSVRG

SEQ ID NO: 1598 - protein, 9 aa, Homo sapiens
  Table 3 sequence identifier: Q13200_C251
  MOD_RES (2)..(2): May or may not be conjugated to a chemical probe
RCALGVFRK

SEQ ID NO: 1599 - protein, 16 aa, Homo sapiens
  Table 3 sequence identifier: P13639_C591
  MOD_RES (12)..(12): May or may not be conjugated to a chemical probe
RETVSEESNVLCLSKS

SEQ ID NO: 1600 - protein, 37 aa, Homo sapiens
  Table 3 sequence identifier: P27816_C126
  MOD_RES (20)..(20): May or may not be conjugated to a chemical probe
KMAYQEYPNSQNWPEDTNFCFQPEQVVDPIQTDPFKM

SEQ ID NO: 1601 - protein, 17 aa, Homo sapiens
  Table 3 sequence identifier: P48739_C187
  MOD_RES (9)..(9): May or may not be conjugated to a chemical probe
KELANSPDCPQMCAYKL

SEQ ID NO: 1602 - protein, 28 aa, Homo sapiens
  Table 3 sequence identifier: P14866_C472
  MOD_RES (18)..(18): May or may not be conjugated to a chemical probe
KQPAIMPGQSYGLEDGSCSYKDFSESRN

SEQ ID NO: 1603 - protein, 9 aa, Homo sapiens
  Table 3 sequence identifier: P07237_C343
  MOD_RES (6)..(6): May or may not be conjugated to a chemical probe
RITEFCHRF

SEQ ID NO: 1604 - protein, 16 aa, Homo sapiens
  Table 3 sequence identifier: O43708_C205
  MOD_RES (14)..(14): May or may not be conjugated to a chemical probe
RLLVLEAFQVSHPCRQ

SEQ ID NO: 1605 - protein, 24 aa, Homo sapiens
  Table 3 sequence identifier: P19623_C25
  MOD_RES (4)..(4): May or may not be conjugated to a chemical probe
RETCSLWPGQALSLQVEQLLHHRR

SEQ ID NO: 1606 - protein, 41 aa, Homo sapiens
  Table 3 sequence identifier: P56537_C56
  MOD_RES (39)..(39): May or may not be conjugated to a chemical probe
KLTNTYCLVAIGGSENFYSVFEGELSDTIPVVHASIAGCRI

SEQ ID NO: 1607 - protein, 25 aa, Homo sapiens
  Table 3 sequence identifier: Q96SW2_C188
  MOD_RES (8)..(8): May or may not be conjugated to a chemical probe
KVQILPECVLPSTMSAVQLESLNKC

SEQ ID NO: 1608 - protein, 17 aa, Homo sapiens
  Table 3 sequence identifier: P41240_C31
  MOD_RES (15)..(15): May or may not be conjugated to a chemical probe
KYNFHGTAEQDLPFCKG

SEQ ID NO: 1609 - protein, 18 aa, Homo sapiens
  Table 3 sequence identifier: P36551_C127
  MOD_RES (2)..(2): May or may not be conjugated to a chemical probe
RCSSFMAPPVTDLGELRR

SEQ ID NO: 1610 - protein, 28 aa, Homo sapiens
  Table 3 sequence identifier: P52292_C133
  MOD_RES (4)..(4): May or may not be conjugated to a chemical probe
RTDCSPIQFESAWALTNIASGTSEQTKA

SEQ ID NO: 1611 - protein, 32 aa, Homo sapiens
  Table 3 sequence identifier: Q04637_C1516
  MOD_RES (4)..(4): May or may not be conjugated to a chemical probe
KYLCDEQKELQALYALQALVVTLEQPPNLLRM

SEQ ID NO: 1612 - protein, 14 aa, Homo sapiens
  Table 3 sequence identifier: P60981_C80
  MOD_RES (12)..(12): May or may not be conjugated to a chemical probe
KHFVGMLPEKDCRY

SEQ ID NO: 1613 - protein, 17 aa, Homo sapiens
  Table 3 sequence identifier: Q7RTV0_C40
  MOD_RES (12)..(12): May or may not be conjugated to a chemical probe
KCVICDSYVRPCTLVRI

SEQ ID NO: 1614 - protein, 20 aa, Homo sapiens
  Table 3 sequence identifier: P19838_C61
  MOD_RES (4)..(4): May or may not be conjugated to a chemical probe
RYVCEGPSHGGLPGASSEKN

SEQ ID NO: 1615 - protein, 21 aa, Homo sapiens
  Table 3 sequence identifier: P53396_C633
  MOD_RES (18)..(18): May or may not be conjugated to a chemical probe
KGVTIIGPATVGGIKPGCFKI

SEQ ID NO: 1616 - protein, 11 aa, Homo sapiens
  Table 3 sequence identifier: P49207_C83
  MOD_RES (8)..(8): May or may not be conjugated to a chemical probe
RAYGGSMCAKC

SEQ ID NO: 1617 - protein, 30 aa, Homo sapiens
  Table 3 sequence identifier: Q14974_C689
  MOD_RES (11)..(11): May or may not be conjugated to a chemical probe
RALQSNIIPFCDEVMQLLLENLGNENVHRS

SEQ ID NO: 1618 - protein, 32 aa, Homo sapiens
  Table 3 sequence identifier: Q96I99_C162
  MOD_RES (3)..(3): May or may not be conjugated to a chemical probe
RSCNGPVLVGSPQGGVDIEEVAASNPELIFKE

SEQ ID NO: 1619 - protein, 13 aa, Homo sapiens
  Table 3 sequence identifier: P51610_C1139
  MOD_RES (3)..(3): May or may not be conjugated to a chemical probe
RACAAGTPAVIRI

SEQ ID NO: 1620 - protein, 24 aa, Homo sapiens
  Table 3 sequence identifier: Q14657_C23
  MOD_RES (22)..(22): May or may not be conjugated to a chemical probe
RDADADAGGGADGGDGRGGHSCRG

SEQ ID NO: 1621 - protein, 14 aa, Homo sapiens
  Table 3 sequence identifier: P13639_C290
  MOD_RES (4)..(4): May or may not be conjugated to a chemical probe
RTFCQLILDPIFKV

SEQ ID NO: 1622 - protein, 17 aa, Homo sapiens
  Table 3 sequence identifier: P22314_C481
  MOD_RES (12)..(12): May or may not be conjugated to a chemical probe
KYFLVGAGAIGCELLKN

SEQ ID NO: 1623 - protein, 11 aa, Homo sapiens
  Table 3 sequence identifier: Q52LJ0_C295
  MOD_RES (6)..(6): May or may not be conjugated to a chemical probe
REKTACAINKV

SEQ ID NO: 1624 - protein, 30 aa, Homo sapiens
  Table 3 sequence identifier: Q7Z2W4_C38
  MOD_RES (19)..(19): May or may not be conjugated to a chemical probe
RMALDALLQEIALSEPQLCEVLQVAGPDRF

SEQ ID NO: 1625 - protein, 41 aa, Homo sapiens
  Table 3 sequence identifier: P26447_C81
  MOD_RES (25)..(25): May or may not be conjugated to a chemical probe
KLMSNLDSNRDNEVDFQEYCVFLSCIAMMCNEFFEGFPDKQ

SEQ ID NO: 1626 - protein, 14 aa, Homo sapiens
  Table 3 sequence identifier: P30041_C47
  MOD_RES (7)..(7): May or may not be conjugated to a chemical probe
RDFTPVCTTELGRA

SEQ ID NO: 1627 - protein, 17 aa, Homo sapiens
  Table 3 sequence identifier: P04040_C377
  MOD_RES (13)..(13): May or may not be conjugated to a chemical probe
RLGPNYLHIPVNCPYRA

SEQ ID NO: 1628 - protein, 12 aa, Homo sapiens
  Table 3 sequence identifier: Q14847_C20
  MOD_RES (4)..(4): May or may not be conjugated to a chemical probe
KVNCLDKFWHKA

SEQ ID NO: 1629 - protein, 9 aa, Homo sapiens
  Table 3 sequence identifier: P55209_C88
  MOD_RES (2)..(2): May or may not be conjugated to a chemical probe
KCAQIEAKF

SEQ ID NO: 1630 - protein, 13 aa, Homo sapiens
  Table 3 sequence identifier: Q9NRP4_C80
  MOD_RES (3)..(3): May or may not be conjugated to a chemical probe
KACFGTFLPEEKL

SEQ ID NO: 1631 - protein, 14 aa, Homo sapiens
  Table 3 sequence identifier: P17987_C385
  MOD_RES (8)..(8): May or may not be conjugated to a chemical probe
RGANDFMCDEMERS

SEQ ID NO: 1632 - protein, 37 aa, Homo sapiens
  Table 3 sequence identifier: P13797_C104
  MOD_RES (5)..(5): May or may not be conjugated to a chemical probe
KEGICALGGTSELSSEGTQHSYSEEEKYAFVNWINKA

SEQ ID NO: 1633 - protein, 25 aa, Homo sapiens
  Table 3 sequence identifier: Q7Z434_C33
  MOD_RES (20)..(20): May or may not be conjugated to a chemical probe
RNFSNFCNVDVVEILPYLPCLTARD

SEQ ID NO: 1634 - protein, 11 aa, Homo sapiens
  Table 3 sequence identifier: P49915_C489
  MOD_RES (2)..(2): May or may not be conjugated to a chemical probe
ACTTEEDQEKL

SEQ ID NO: 1635 - protein, 18 aa, Homo sapiens
  Table 3 sequence identifier: Q9H814_C51
  MOD_RES (10)..(10): May or may not be conjugated to a chemical probe
RAFQNTATACAPVSHYRA

SEQ ID NO: 1636 - protein, 24 aa, Homo sapiens
  Table 3 sequence identifier: Q15181_C274
  MOD_RES (15)..(15): May or may not be conjugated to a chemical probe
RAIVDALPPPCESACTVPTDVDKW

SEQ ID NO: 1637 - protein, 27 aa, Homo sapiens
  Table 3 sequence identifier: Q9UPN7_C795
  MOD_RES (9)..(9): May or may not be conjugated to a chemical probe
KVTEPSAPCQALVSIGDLQATFHGIRS

SEQ ID NO: 1638 - protein, 36 aa, Homo sapiens
  Table 3 sequence identifier: P50395_C202
  MOD_RES (29)..(29): May or may not be conjugated to a chemical probe
KFDLGQDVIDFTGHALALYRTDDYLDQPCYETINRI

SEQ ID NO: 1639 - protein, 20 aa, Homo sapiens
  Table 3 sequence identifier: P27695_C296
  MOD_RES (16)..(16): May or may not be conjugated to a chemical probe
RLDYFLLSHSLLPALCDSKI

SEQ ID NO: 1640 - protein, 10 aa, Homo sapiens
  Table 3 sequence identifier: P13010_C493
  MOD_RES (5)..(5): May or may not be conjugated to a chemical probe
RLFQCLLHRA

SEQ ID NO: 1641 - protein, 29 aa, Homo sapiens
  Table 3 sequence identifier: P27635_C49
  MOD_RES (8)..(8): May or may not be conjugated to a chemical probe
KVDEFPLCGHMVSDEYEQLSSEALEAARI

SEQ ID NO: 1642 - protein, 24 aa, Homo sapiens
  Table 3 sequence identifier: Q9BZE9_C109
  MOD_RES (7)..(7): May or may not be conjugated to a chemical probe
RLQDSFCSGQTLWELLSHFPQIRE

SEQ ID NO: 1643 - protein, 23 aa, Homo sapiens
  Table 3 sequence identifier: P43487_C99
  MOD_RES (3)..(3): May or may not be conjugated to a chemical probe
KICANHYITPMMELKPNAGSDRA

SEQ ID NO: 1644 - protein, 20 aa, Homo sapiens
  Table 3 sequence identifier: P78527_C1904
  MOD_RES (10)..(10): May or may not be conjugated to a chemical probe
KINQVFHGSCITEGNELTKT

SEQ ID NO: 1645 - protein, 29 aa, Homo sapiens
  Table 3 sequence identifier: Q6JBY9_C155
  MOD_RES (25)..(25): May or may not be conjugated to a chemical probe
RSRPSEAEEVPVSFDQPPEGSHLPCYNKV

SEQ ID NO: 1646 - protein, 27 aa, Homo sapiens
  Table 3 sequence identifier: P14625_C576
  MOD_RES (16)..(16): May or may not be conjugated to a chemical probe
KGYEVIYLTEPVDEYCIQALPEFDGKR

SEQ ID NO: 1647 - protein, 24 aa, Homo sapiens
  Table 3 sequence identifier: Q8N806_C260
  MOD_RES (9)..(9): May or may not be conjugated to a chemical probe
KVEQNSEPCAGSSSESDLQTVFKN

SEQ ID NO: 1648 - protein, 17 aa, Homo sapiens
  Table 3 sequence identifier: Q9GZT9_C127
  MOD_RES (15)..(15): May or may not be conjugated to a chemical probe
KAKPPADPAAAASPCRA

SEQ ID NO: 1649 - protein, 19 aa, Homo sapiens
  Table 3 sequence identifier: P06744_C404
  MOD_RES (5)..(5): May or may not be conjugated to a chemical probe
KMIPCDFLIPVQTQHPIRK

SEQ ID NO: 1650 - protein, 15 aa, Homo sapiens
  Table 3 sequence identifier: P00390_C102
  MOD_RES (6)..(6): May or may not be conjugated to a chemical probe
KLGGTCVNVGCVPKK

SEQ ID NO: 1651 - protein, 13 aa, Homo sapiens
  Table 3 sequence identifier: P25398_C106
  MOD_RES (6)..(6): May or may not be conjugated to a chemical probe
RKVVGCSCVVVKD

SEQ ID NO: 1652 - protein, 17 aa, Homo sapiens
  Table 3 sequence identifier: Q00839_C497
  MOD_RES (3)..(3): May or may not be conjugated to a chemical probe
KDCEVVMMIGLPGAGKT

SEQ ID NO: 1653 - protein, 14 aa, Homo sapiens
  Table 3 sequence identifier: P49368_C455
  MOD_RES (7)..(7): May or may not be conjugated to a chemical probe
RTLIQNCGASTIRL

SEQ ID NO: 1654 - protein, 15 aa, Homo sapiens
  Table 3 sequence identifier: P33993_C482
  MOD_RES (2)..(2): May or may not be conjugated to a chemical probe
RCSILAAANPAYGRY

SEQ ID NO: 1655 - protein, 22 aa, Homo sapiens
  Table 3 sequence identifier: P57764_C191
  MOD_RES (9)..(9): May or may not be conjugated to a chemical probe
RFSLPGATCLQGEGQGHLSQKK

SEQ ID NO: 1656 - protein, 30 aa, Homo sapiens
  Table 3 sequence identifier: P40222_C523
  MOD_RES (7)..(7): May or may not be conjugated to a chemical probe
RVTEAPCYPGAPSTEASGQTGPQEPTSARA

SEQ ID NO: 1657 - protein, 32 aa, Homo sapiens
  Table 3 sequence identifier: Q9NTZ6_C887
  MOD_RES (29)..(29): May or may not be conjugated to a chemical probe
KVQNMPFTVSIDEILDFFYGYQVIPGSVCLKY

SEQ ID NO: 1658 - protein, 25 aa, Homo sapiens
  Table 3 sequence identifier: Q9Y617_C80
  MOD_RES (10)..(10): May or may not be conjugated to a chemical probe
KVIFLQGGGCGQFSAVPLNLIGLKA

SEQ ID NO: 1659 - protein, 29 aa, Homo sapiens
  Table 3 sequence identifier: P27695_C99
  MOD_RES (2)..(2): May or may not be conjugated to a chemical probe
KCSENKLPAELQELPGLSHQYWSAPSDKE

SEQ ID NO: 1660 - protein, 14 aa, Homo sapiens
  Table 3 sequence identifier: Q7Z6Z7_C3239
  MOD_RES (8)..(8): May or may not be conjugated to a chemical probe
RSSESELCIETPKL

SEQ ID NO: 1661 - protein, 28 aa, Homo sapiens
  Table 3 sequence identifier: Q16644_C203
  MOD_RES (12)..(12): May or may not be conjugated to a chemical probe
KETTQNALQTPCYTPYYVAPEVLGPEKY

SEQ ID NO: 1662 - protein, 12 aa, Homo sapiens
  Table 3 sequence identifier: O15355_C13
  MOD_RES (2)..(2): May or may not be conjugated to a chemical probe
KCSGDGVGAPRL

SEQ ID NO: 1663 - protein, 29 aa, Homo sapiens
  Table 3 sequence identifier: Q15149_C3821
  MOD_RES (11)..(11): May or may not be conjugated to a chemical probe
REALEAESAWCYLYGTGSVAGVYLPGSRQ

SEQ ID NO: 1664 - protein, 11 aa, Homo sapiens
  Table 3 sequence identifier: O94776_C209
  MOD_RES (5)..(5): May or may not be conjugated to a chemical probe
RALDCSSSIRQ

SEQ ID NO: 1665 - protein, 17 aa, Homo sapiens
  Table 3 sequence identifier: A6NHG4_C24
  MOD_RES (3)..(3): May or may not be conjugated to a chemical probe
RLCAAAASILGKPADRV

SEQ ID NO: 1666 - protein, 30 aa, Homo sapiens
  Table 3 sequence identifier: P35611_C430
  MOD_RES (25)..(25): May or may not be conjugated to a chemical probe
KYSDVEVPASVTGYSFASDGDSGTCSPLRH

SEQ ID NO: 1667 - protein, 22 aa, Homo sapiens
  Table 3 sequence identifier: Q9NVA2_C41
  MOD_RES (8)..(8): May or may not be conjugated to a chemical probe
KSTSQGFCFNILCVGETGIGKS

SEQ ID NO: 1668 - protein, 28 aa, Homo sapiens
  Table 3 sequence identifier: P19404_C225
  MOD_RES (4)..(4): May or may not be conjugated to a chemical probe
RFSCEPAGGLTSLTEPPKGPGFGVQAGL

SEQ ID NO: 1669 - protein, 13 aa, Homo sapiens
  Table 3 sequence identifier: P35579_C569
  MOD_RES (5)..(5): May or may not be conjugated to a chemical probe
KADFCIIHYAGKV

SEQ ID NO: 1670 - protein, 17 aa, Homo sapiens
  Table 3 sequence identifier: P19367_C834
  MOD_RES (6)..(6): May or may not be conjugated to a chemical probe
RAAQLCGAGMAAVVDKI

SEQ ID NO: 1671 - protein, 24 aa, Homo sapiens
  Table 3 sequence identifier: P30041_C91
  MOD_RES (8)..(8): May or may not be conjugated to a chemical probe
KDINAYNCEEPTEKLPFPIIDDRN

SEQ ID NO: 1672 - protein, 24 aa, Homo sapiens
  Table 3 sequence identifier: P21281_C162
  MOD_RES (22)..(22): May or may not be conjugated to a chemical probe
RGPVVLAEDFLDIMGQPINPQCRI

SEQ ID NO: 1673 - protein, 12 aa, Homo sapiens
  Table 3 sequence identifier: P13796_C42
  MOD_RES (4)..(4): May or may not be conjugated to a chemical probe
KAACLPLPGYRV

SEQ ID NO: 1674 - protein, 14 aa, Homo sapiens
  Table 3 sequence identifier: O00410_C687
  MOD_RES (10)..(10): May or may not be conjugated to a chemical probe
KSTACQMLVCYAKE

SEQ ID NO: 1675 - protein, 11 aa, Homo sapiens
  Table 3 sequence identifier: P49207_C49
  MOD_RES (7)..(7): May or may not be conjugated to a chemical probe
KSACGVCPGRL

SEQ ID NO: 1676 - protein, 21 aa, Homo sapiens
  Table 3 sequence identifier: P35658_C186
  MOD_RES (3)..(3): May or may not be conjugated to a chemical probe
KVCATLPSTVAVTSVCWSPKG

SEQ ID NO: 1677 - protein, 35 aa, Homo sapiens
  Table 3 sequence identifier: P17858_C170
  MOD_RES (20)..(20): May or may not be conjugated to a chemical probe
RTYSHLNIAGLVGSIDNDFCGTDMTIGTDSALHRI

SEQ ID NO: 1678 - protein, 11 aa, Homo sapiens
  Table 3 sequence identifier: P21333_C574
  MOD_RES (6)..(6): May or may not be conjugated to a chemical probe
KVGTECGNQKV

SEQ ID NO: 1679 - protein, 32 aa, Homo sapiens
  Table 3 sequence identifier: O60701_C241
  MOD_RES (12)..(12): May or may not be conjugated to a chemical probe
RISSINSISALCEATGADVEEVATAIGMDQRI

SEQ ID NO: 1680 - protein, 21 aa, Homo sapiens
  Table 3 sequence identifier: Q15691_C228
  MOD_RES (7)..(7): May or may not be conjugated to a chemical probe
RNIELICQENEGENDPVLQRI

SEQ ID NO: 1681 - protein, 25 aa, Homo sapiens
  Table 3 sequence identifier: P31153_C104
  MOD_RES (3)..(3): May or may not be conjugated to a chemical probe
KTCNVLVALEQQSPDIAQGVHLDRN

SEQ ID NO: 1682 - protein, 12 aa, Homo sapiens
  Table 3 sequence identifier: Q14247_C246
  MOD_RES (2)..(2): May or may not be conjugated to a chemical probe
KCALGWDHQEKL

SEQ ID NO: 1683 - protein, 13 aa, Homo sapiens
  Table 3 sequence identifier: Q8IWX8_C69
  MOD_RES (11)..(11): May or may not be conjugated to a chemical probe
KLALEQQQLICKQ

SEQ ID NO: 1684 - protein, 20 aa, Homo sapiens
  Table 3 sequence identifier: Q99543_C394
  MOD_RES (9)..(9): May or may not be conjugated to a chemical probe
RLELASLQCLNETLTSCTKE

SEQ ID NO: 1685 - protein, 14 aa, Homo sapiens
  Table 3 sequence identifier: Q6JBY9_C181
  MOD_RES (6)..(6): May or may not be conjugated to a chemical probe
RSQSDCGELGDFRA

SEQ ID NO: 1686 - protein, 13 aa, Homo sapiens
  Table 3 sequence identifier: P12814_C41
  MOD_RES (7)..(7): May or may not be conjugated to a chemical probe
KTFTAWCNSHLRK

SEQ ID NO: 1687 - protein, 10 aa, Homo sapiens
  Table 3 sequence identifier: P17812_C491
  MOD_RES (2)..(2): May or may not be conjugated to a chemical probe
KCLEEQGLKF

SEQ ID NO: 1688 - protein, 21 aa, Homo sapiens
  Table 3 sequence identifier: E7ETI0_C21
  MOD_RES (9)..(9): May or may not be conjugated to a chemical probe
RATLQAALCLENFSSQVVERH

SEQ ID NO: 1689 - protein, 16 aa, Homo sapiens
  Table 3 sequence identifier: Q9ULC4_C14
  MOD_RES (11)..(11): May or may not be conjugated to a chemical probe
KFDEKENVSNCIQLKT

SEQ ID NO: 1690 - protein, 13 aa, Homo sapiens
  Table 3 sequence identifier: P08134_C16
  MOD_RES (10)..(10): May or may not be conjugated to a chemical probe
KLVIVGDGACGKT

SEQ ID NO: 1691 - protein, 16 aa, Homo sapiens
  Table 3 sequence identifier: Q14980_C80
  MOD_RES (9)..(9): May or may not be conjugated to a chemical probe
RKHPSSPECLVSAQKV

SEQ ID NO: 1692 - protein, 10 aa, Homo sapiens
  Table 3 sequence identifier: Q9NYL9_C231
  MOD_RES (2)..(2): May or may not be conjugated to a chemical probe
KCFSLAATRS

SEQ ID NO: 1693 - protein, 13 aa, Homo sapiens
  Table 3 sequence identifier: Q99439_C61
  MOD_RES (7)..(7): May or may not be conjugated to a chemical probe
KDGTILCTLMNKL

SEQ ID NO: 1694 - protein, 11 aa, Homo sapiens
  Table 3 sequence identifier: P46776_C144
  MOD_RES (7)..(7): May or may not be conjugated to a chemical probe
KSVGGACVLVA

SEQ ID NO: 1695 - protein, 16 aa, Homo sapiens
  Table 3 sequence identifier: O14980_C164
  MOD_RES (7)..(7): May or may not be conjugated to a chemical probe
RTSESLCQNNMVILKL

SEQ ID NO: 1696 - protein, 17 aa, Homo sapiens
  Table 3 sequence identifier: Q9Y2L1_C213
  MOD_RES (4)..(4): May or may not be conjugated to a chemical probe
RLACLSEEGNEIESGKI

SEQ ID NO: 1697 - protein, 13 aa, Homo sapiens
  Table 3 sequence identifier: O60502_C596
  MOD_RES (11)..(11): May or may not be conjugated to a chemical probe
RANSSVVSVNCKG

SEQ ID NO: 1698 - protein, 12 aa, Homo sapiens
  Table 3 sequence identifier: P49748_C237
  MOD_RES (9)..(9): May or may not be conjugated to a chemical probe
RTSAVPSPCGKY

SEQ ID NO: 1699 - protein, 14 aa, Homo sapiens
  Table 3 sequence identifier: O76003_C146
  MOD_RES (8)..(8): May or may not be conjugated to a chemical probe
KLTHAAPCMLFMKG

SEQ ID NO: 1700 - protein, 25 aa, Homo sapiens
  Table 3 sequence identifier: P27797_C163
  MOD_RES (2)..(2): May or may not be conjugated to a chemical probe
RCKDDEFTHLYTLIVRPDNTYEVKI

SEQ ID NO: 1701 - protein, 30 aa, Homo sapiens
  Table 3 sequence identifier: P49368_C279
  MOD_RES (14)..(14): May or may not be conjugated to a chemical probe
RILQMEEEYIQQLCEDIIQLKPDVVITEKG

SEQ ID NO: 1702 - protein, 41 aa, Homo sapiens
  Table 3 sequence identifier: P32119_C172
  MOD_RES (16)..(16): May or may not be conjugated to a chemical probe
RLVQAFQYTDEHGEVCPAGWKPGSDTIKPNVDDSKEYFSKH

SEQ ID NO: 1703 - protein, 13 aa, Homo sapiens
  Table 3 sequence identifier: O15541_C15
  MOD_RES (7)..(7): May or may not be conjugated to a chemical probe
KAVDQVCTFLFKK

SEQ ID NO: 1704 - protein, 13 aa, Homo sapiens
  Table 3 sequence identifier: Q15417_C59
  MOD_RES (7)..(7): May or may not be conjugated to a chemical probe
KDGIILCELINKL

SEQ ID NO: 1705 - protein, 20 aa, Homo sapiens
  Table 3 sequence identifier: P60981_C135
  MOD_RES (9)..(9): May or may not be conjugated to a chemical probe
KFQGIKHECQANGPEDLNRA

SEQ ID NO: 1706 - protein, 11 aa, Homo sapiens
  Table 3 sequence identifier: P36776_C682
  MOD_RES (4)..(4): May or may not be conjugated to a chemical probe
RALCGLDESKA

SEQ ID NO: 1707 - protein, 17 aa, Homo sapiens
  Table 3 sequence identifier: P13693_C28
  MOD_RES (10)..(10): May or may not be conjugated to a chemical probe
KIREIADGLCLEVEGKM

SEQ ID NO: 1708 - protein, 11 aa, Homo sapiens
  Table 3 sequence identifier: B5ME19_C444
  MOD_RES (3)..(3): May or may not be conjugated to a chemical probe
RGCILTLVERM

SEQ ID NO: 1709 - protein, 25 aa, Homo sapiens
  Table 3 sequence identifier: Q93009_C223
  MOD_RES (7)..(7): May or may not be conjugated to a chemical probe
KNQGATCYMNSLLQTLFFTNQLRKA

SEQ ID NO: 1710 - protein, 19 aa, Homo sapiens
  Table 3 sequence identifier: Q9UPQ0_C669
  MOD_RES (2)..(2): May or may not be conjugated to a chemical probe
RCSPTVAFVEFPSSPQLKN

SEQ ID NO: 1711 - protein, 12 aa, Homo sapiens
  Table 3 sequence identifier: Q96EY4_C162
  MOD_RES (4)..(4): May or may not be conjugated to a chemical probe
RKICANDAIPKT

SEQ ID NO: 1712 - protein, 25 aa, Homo sapiens
  Table 3 sequence identifier: Q9BSH5_C243
  MOD_RES (17)..(17): May or may not be conjugated to a chemical probe
KEHILPSLAHLLPALDCLEGSTPGL

SEQ ID NO: 1713 - protein, 18 aa, Homo sapiens
  Table 3 sequence identifier: Q99832_C450
  MOD_RES (4)..(4): May or may not be conjugated to a chemical probe
RQLCDNAGFDATNILNKL

SEQ ID NO: 1714 - protein, 34 aa, Homo sapiens
  Table 3 sequence identifier: P68366_C129
  MOD_RES (6)..(6): May or may not be conjugated to a chemical probe
KLSDQCTGLQGFLVFHSFGGGTGSGFTSLLMERL

SEQ ID NO: 1715 - protein, 20 aa, Homo sapiens
  Table 3 sequence identifier: Q6IS14_C73
  MOD_RES (7)..(7): May or may not be conjugated to a chemical probe
KKYEDICPSTHNMDVPNIKR

SEQ ID NO: 1716 - protein, 22 aa, Homo sapiens
  Table 3 sequence identifier: P52907_C157
  MOD_RES (12)..(12): May or may not be conjugated to a chemical probe
KTIDGQQTIIACIESHQFQPKN

SEQ ID NO: 1717 - protein, 14 aa, Homo sapiens
  Table 3 sequence identifier: P78527_C25
  MOD_RES (2)..(2): May or may not be conjugated to a chemical probe
RCGAALAGHQLIRG

SEQ ID NO: 1718 - protein, 19 aa, Homo sapiens
  Table 3 sequence identifier: O43592_C650
  MOD_RES (8)..(8): May or may not be conjugated to a chemical probe
RQASLADCLNHAVGFASRT

SEQ ID NO: 1719 - protein, 22 aa, Homo sapiens
  Table 3 sequence identifier: P49459_C88
  MOD_RES (14)..(14): May or may not be conjugated to a chemical probe
KMFHPNVYADGSICLDILQNRW

SEQ ID NO: 1720 - protein, 20 aa, Homo sapiens
  Table 3 sequence identifier: Q9UEW8_C237
  MOD_RES (8)..(8): May or may not be conjugated to a chemical probe
KTFVGTPCWMAPEVMEQVRG

SEQ ID NO: 1721 - protein, 15 aa, Homo sapiens
  Table 3 sequence identifier: Q92888_C537
  MOD_RES (3)..(3): May or may not be conjugated to a chemical probe
RFCAFVQEAESRPRC

SEQ ID NO: 1722 - protein, 18 aa, Homo sapiens
  Table 3 sequence identifier: P17812_C362
  MOD_RES (3)..(3): May or may not be conjugated to a chemical probe
KLCSAHGVLVPGGFGVRG

SEQ ID NO: 1723 - protein, 24 aa, Homo sapiens
  Table 3 sequence identifier: Q8IY67_C255
  MOD_RES (16)..(16): May or may not be conjugated to a chemical probe
RALSAVHSPTFCQLACGQDGQLKG

SEQ ID NO: 1724 - protein, 11 aa, Homo sapiens
  Table 3 sequence identifier: Q13547_C408
  MOD_RES (5)..(5): May or may not be conjugated to a chemical probe
RISICSSDKRI

SEQ ID NO: 1725 - protein, 15 aa, Homo sapiens
  Table 3 sequence identifier: P00505_C106
  MOD_RES (13)..(13): May or may not be conjugated to a chemical probe
KEYLPIGGLAEFCKA

SEQ ID NO: 1726 - protein, 9 aa, Homo sapiens
  Table 3 sequence identifier: P35579_C816
  MOD_RES (3)..(3): May or may not be conjugated to a chemical probe
RNCAAYLKL

SEQ ID NO: 1727 - protein, 11 aa, Homo sapiens
  Table 3 sequence identifier: O00148_C197
  MOD_RES (8)..(8): May or may not be conjugated to a chemical probe
KHFVLDECDKM

SEQ ID NO: 1728 - protein, 14 aa, Homo sapiens
  Table 3 sequence identifier: Q14192_C150
  MOD_RES (7)..(7): May or may not be conjugated to a chemical probe
KDNQNFCVPCYEKQ

SEQ ID NO: 1729 - protein, 12 aa, Homo sapiens
  Table 3 sequence identifier: Q14204_C633
  MOD_RES (10)..(10): May or may not be conjugated to a chemical probe
KVQYPQSQACKM

SEQ ID NO: 1730 - protein, 19 aa, Homo sapiens
  Table 3 sequence identifier: P07814_C1487
  MOD_RES (11)..(11): May or may not be conjugated to a chemical probe
KSLCIPFKPLCELQPGAKC

SEQ ID NO: 1731 - protein, 53 aa, Homo sapiens
  Table 3 sequence identifier: P27816_C1098
  MOD_RES (12)..(12): May or may not be conjugated to a chemical probe
KTEGGGSEAPLCPGPPAGEEPAISEAAPEAGAPTSASGLNGHPTLSGGGDQRE

SEQ ID NO: 1732 - protein, 16 aa, Homo sapiens
  Table 3 sequence identifier: P61586_C107
  MOD_RES (4)..(4): May or may not be conjugated to a chemical probe
KHFCPNVPIILVGNKK

SEQ ID NO: 1733 - protein, 23 aa, Homo sapiens
  Table 3 sequence identifier: Q08J23_C673
  MOD_RES (14)..(14): May or may not be conjugated to a chemical probe
KYEPDSANPDALQCPIVLCGWRG

SEQ ID NO: 1734 - protein, 15 aa, Homo sapiens
  Table 3 sequence identifier: P53041_C77
  MOD_RES (4)..(4): May or may not be conjugated to a chemical probe
RTECYGYALGDATRA

SEQ ID NO: 1735 - protein, 11 aa, Homo sapiens
  Table 3 sequence identifier: O43707_C173
  MOD_RES (8)..(8): May or may not be conjugated to a chemical probe
KEGLLLWCQRK

SEQ ID NO: 1736 - protein, 25 aa, Homo sapiens
  Table 3 sequence identifier: Q06210_C55
  MOD_RES (23)..(23): May or may not be conjugated to a chemical probe
RGYDSAGVGFDGGNDKDWEANACKI

SEQ ID NO: 1737 - protein, 12 aa, Homo sapiens
  Table 3 sequence identifier: P06400_C853
  MOD_RES (7)..(7): May or may not be conjugated to a chemical probe
KINQMVCNSDRV

SEQ ID NO: 1738 - protein, 24 aa, Homo sapiens
  Table 3 sequence identifier: Q9BUJ2_C391
  MOD_RES (6)..(6): May or may not be conjugated to a chemical probe
RAEPYCSVLPGFTFIQHLPLSERI

SEQ ID NO: 1739 - protein, 11 aa, Homo sapiens
  Table 3 sequence identifier: E7EVH7_C286
  MOD_RES (3)..(3): May or may not be conjugated to a chemical probe
RLCQENQWLRD

SEQ ID NO: 1740 - protein, 11 aa, Homo sapiens
  Table 3 sequence identifier: Q68CZ2_C1241
  MOD_RES (7)..(7): May or may not be conjugated to a chemical probe
RHFLIECTPKG

SEQ ID NO: 1741 - protein, 9 aa, Homo sapiens
  Table 3 sequence identifier: Q9Y5Y2_C72
  MOD_RES (6)..(6): May or may not be conjugated to a chemical probe
RAVHQCDRG

SEQ ID NO: 1742 - protein, 15 aa, Homo sapiens
  Table 3 sequence identifier: P11498_C850
  MOD_RES (9)..(9): May or may not be conjugated to a chemical probe
RGLYAAFDCTATMKS

SEQ ID NO: 1743 - protein, 15 aa, Homo sapiens
  Table 3 sequence identifier: Q9BXS6_C256
  MOD_RES (3)..(3): May or may not be conjugated to a chemical probe
RSCGPASQSTLGLKG

SEQ ID NO: 1744 - protein, 24 aa, Homo sapiens
  Table 3 sequence identifier: P56192_C38
  MOD_RES (14)..(14): May or may not be conjugated to a chemical probe
RAEVLISTVGPEDCVVPFLTRPKV

SEQ ID NO: 1745 - protein, 9 aa, Homo sapiens
  Table 3 sequence identifier: P35914_C323
  MOD_RES (7)..(7): May or may not be conjugated to a chemical probe
KVAQATCKL

SEQ ID NO: 1746 - protein, 14 aa, Homo sapiens
  Table 3 sequence identifier: P00367_C172
  MOD_RES (2)..(2): May or may not be conjugated to a chemical probe
KCAVVDVPFGGAKA

SEQ ID NO: 1747 - protein, 15 aa, Homo sapiens
  Table 3 sequence identifier: Q99873_C350
  MOD_RES (5)..(5): May or may not be conjugated to a chemical probe
KGQLCELSCSTDYRM

SEQ ID NO: 1748 - protein, 28 aa, Homo sapiens
  Table 3 sequence identifier: P15170_C276
  MOD_RES (7)..(7): May or may not be conjugated to a chemical probe
KEQSDFCPWYIGLPFIPYLDNLPNFNRS

SEQ ID NO: 1749 - protein, 14 aa, Homo sapiens
  Table 3 sequence identifier: Q13838_C165
  MOD_RES (3)..(3): May or may not be conjugated to a chemical probe
KNCPHIVVGTPGRI

SEQ ID NO: 1750 - protein, 15 aa, Homo sapiens
  Table 3 sequence identifier: O75369_C1617
  MOD_RES (2)..(2): May or may not be conjugated to a chemical probe
KCLATGPGIASTVKT

SEQ ID NO: 1751 - protein, 21 aa, Homo sapiens
  Table 3 sequence identifier: Q96RU3_C609
  MOD_RES (17)..(17): May or may not be conjugated to a chemical probe
RNEDEEGYVPTSYVEVCLDKN

SEQ ID NO: 1752 - protein, 34 aa, Homo sapiens
  Table 3 sequence identifier: P16333_C266
  MOD_RES (23)..(23): May or may not be conjugated to a chemical probe
KNYVTVMQNNPLTSGLEPSPPQCDYIRPSLTGKF

SEQ ID NO: 1753 - protein, 11 aa, Homo sapiens
  Table 3 sequence identifier: P35250_C88
  MOD_RES (7)..(7): May or may not be conjugated to a chemical probe
KTTSILCLARA

SEQ ID NO: 1754 - protein, 17 aa, Homo sapiens
  Table 3 sequence identifier: Q9BSD7_C184
  MOD_RES (11)..(11): May or may not be conjugated to a chemical probe
RNHLLPDIVTCVQSSRK

SEQ ID NO: 1755 - protein, 35 aa, Homo sapiens
  Table 3 sequence identifier: P13489_C142
  MOD_RES (33)..(33): May or may not be conjugated to a chemical probe
RTLPTLQELHLSDNLLGDAGLQLLCEGLLDPQCRL

SEQ ID NO: 1756 - protein, 22 aa, Homo sapiens
  Table 3 sequence identifier: P26639_C343
  MOD_RES (16)..(16): May or may not be conjugated to a chemical probe
RDQELYFFHELSPGSCFFLPKG

SEQ ID NO: 1757 - protein, 10 aa, Homo sapiens
  Table 3 sequence identifier: P31153_C56
  MOD_RES (4)..(4): May or may not be conjugated to a chemical probe
KVACETVAKT

SEQ ID NO: 1758 - protein, 17 aa, Homo sapiens
  Table 3 sequence identifier: P01591_C131
  MOD_RES (2)..(2): May or may not be conjugated to a chemical probe
KCYTAVVPLVYGGETKM

SEQ ID NO: 1759 - protein, 12 aa, Homo sapiens
  Table 3 sequence identifier: P07858_C93
  MOD_RES (7)..(7): May or may not be conjugated to a chemical probe
REQWPQCPTIKE

SEQ ID NO: 1760 - protein, 14 aa, Homo sapiens
  Table 3 sequence identifier: P62191_C399
  MOD_RES (4)..(4): May or may not be conjugated to a chemical probe
KAICTEAGLMALRE

SEQ ID NO: 1761 - protein, 14 aa, Homo sapiens
  Table 3 sequence identifier: P85037_C439
  MOD_RES (10)..(10): May or may not be conjugated to a chemical probe
RSGGLQTPECLSRE

SEQ ID NO: 1762 - protein, 31 aa, Homo sapiens
  Table 3 sequence identifier: Q96EY7_C642
  MOD_RES (24)..(24): May or may not be conjugated to a chemical probe
KVSNSPSQAIEVVELASAFSLPICEGLTQRV

SEQ ID NO: 1763 - protein, 12 aa, Homo sapiens
  Table 3 sequence identifier: P78417_C192
  MOD_RES (5)..(5): May or may not be conjugated to a chemical probe
KLNECVDHTPKL

SEQ ID NO: 1764 - protein, 24 aa, Homo sapiens
  Table 3 sequence identifier: O75694_C704
  MOD_RES (12)..(12): May or may not be conjugated to a chemical probe
REITAIESSVPCQLLESVLQELKG

SEQ ID NO: 1765 - protein, 32 aa, Homo sapiens
  Table 3 sequence identifier: Q9NZD2_C36
  MOD_RES (21)..(21): May or may not be conjugated to a chemical probe
KQIETGPFLEAVSHLPPFFDCLGSPVFTPIKA

SEQ ID NO: 1766 - protein, 14 aa, Homo sapiens
  Table 3 sequence identifier: Q9NR45_C287
  MOD_RES (10)..(10): May or may not be conjugated to a chemical probe
KQLLPCEMACNEKL

SEQ ID NO: 1767 - protein, 25 aa, Homo sapiens
  Table 3 sequence identifier: P52788_C318
  MOD_RES (8)..(8): May or may not be conjugated to a chemical probe
KYFTQGNCVNLTEALSLYEEQLGRL

SEQ ID NO: 1768 - protein, 11 aa, Homo sapiens
  Table 3 sequence identifier: P52788_C337
  MOD_RES (4)..(4): May or may not be conjugated to a chemical probe
RLYCPVEFSKE

SEQ ID NO: 1769 - protein, 15 aa, Homo sapiens
  Table 3 sequence identifier: P37837_C250
  MOD_RES (6)..(6): May or may not be conjugated to a chemical probe
KALAGCDFLTISPKL

SEQ ID NO: 1770 - protein, 16 aa, Homo sapiens
  Table 3 sequence identifier: Q9UBB4_C283
  MOD_RES (14)..(14): May or may not be conjugated to a chemical probe
RHAELIASTFVDQCKT

SEQ ID NO: 1771 - protein, 14 aa, Homo sapiens
  Table 3 sequence identifier: Q14204_C1888
  MOD_RES (2)..(2): May or may not be conjugated to a chemical probe
RCYLTMTQALEARL

SEQ ID NO: 1772 - protein, 9 aa, Homo sapiens
  Table 3 sequence identifier: P14866_C452
  MOD_RES (5)..(5): May or may not be conjugated to a chemical probe
KLNVCVSKQ

SEQ ID NO: 1773 - protein, 19 aa, Homo sapiens
  Table 3 sequence identifier: P56537_C15
  MOD_RES (15)..(15): May or may not be conjugated to a chemical probe
MAVRASFENNCEIGCFAKL

SEQ ID NO: 1774 - protein, 17 aa, Homo sapiens
  Table 3 sequence identifier: Q9Y5Y2_C54
  MOD_RES (10)..(10): May or may not be conjugated to a chemical probe
KVGILDVDLCGPSIPRM

SEQ ID NO: 1775 - protein, 17 aa, Homo sapiens
  Table 3 sequence identifier: P28838_C445
  MOD_RES (6)..(6): May or may not be conjugated to a chemical probe
RQVVDCQLADVNNIGKY

SEQ ID NO: 1776 - protein, 12 aa, Homo sapiens
  Table 3 sequence identifier: P31350_C317
  MOD_RES (7)..(7): May or may not be conjugated to a chemical probe
KLIGMNCTLMKQ

SEQ ID NO: 1777 - protein, 16 aa, Homo sapiens
  Table 3 sequence identifier: Q04637_C1384
  MOD_RES (14)..(14): May or may not be conjugated to a chemical probe
KAASLLLEILGLLCKS

SEQ ID NO: 1778 - protein, 13 aa, Homo sapiens
  Table 3 sequence identifier: P63167_C56
  MOD_RES (8)..(8): May or may not be conjugated to a chemical probe
KYNPTWHCIVGRN

SEQ ID NO: 1779 - protein, 10 aa, Homo sapiens
  Table 3 sequence identifier: Q86WR0_C83
  MOD_RES (8)..(8): May or may not be conjugated to a chemical probe
KANSIQGCKM

SEQ ID NO: 1780 - protein, 14 aa, Homo sapiens
  Table 3 sequence identifier: P41227_C194
  MOD_RES (12)..(12): May or may not be conjugated to a chemical probe
KGNSPPSSGEACRE

SEQ ID NO: 1781 - protein, 12 aa, Homo sapiens
  Table 3 sequence identifier: Q9BY42_C262
  MOD_RES (7)..(7): May or may not be conjugated to a chemical probe
KAGKPPCGATKR

SEQ ID NO: 1782 - protein, 25 aa, Homo sapiens
  Table 3 sequence identifier: Q9NVP2_C172
  MOD_RES (14)..(14): May or may not be conjugated to a chemical probe
RLEAIETQDPSLGCGLPLNCTPIKG

SEQ ID NO: 1783 - protein, 25 aa, Homo sapiens
  Table 3 sequence identifier: Q8IZ07_C540
  MOD_RES (15)..(15): May or may not be conjugated to a chemical probe
RAIQESLLTSTEGLCPSALSETSRF

SEQ ID NO: 1784 - protein, 36 aa, Homo sapiens
  Table 3 sequence identifier: Q8IUI8_C154
  MOD_RES (21)..(21): May or may not be conjugated to a chemical probe
KASHIQLDSLPEVPLLVDVPCLSAQLDDSILNIVKD

SEQ ID NO: 1785 - protein, 32 aa, Homo sapiens
  Table 3 sequence identifier: Q9H6S3_C543
  MOD_RES (10)..(10): May or may not be conjugated to a chemical probe
RSGQAGYVPCNILGEARPEDAGAPFEQAGQKY

SEQ ID NO: 1786 - protein, 29 aa, Homo sapiens
  Table 3 sequence identifier: Q06124_C573
  MOD_RES (24)..(24): May or may not be conjugated to a chemical probe
KYSLADQTSGDQSPLPPCTPTPPCAEMRE

SEQ ID NO: 1787 - protein, 10 aa, Homo sapiens
  Table 3 sequence identifier: P62829_C125
  MOD_RES (3)..(3): May or may not be conjugated to a chemical probe
KECADLWPRI

SEQ ID NO: 1788 - protein, 18 aa, Homo sapiens
  Table 3 sequence identifier: P55769_C93
  MOD_RES (3)..(3): May or may not be conjugated to a chemical probe
RACGVSRPVIACSVTIKE

SEQ ID NO: 1789 - protein, 34 aa, Homo sapiens
  Table 3 sequence identifier: Q15233_C208
  MOD_RES (2)..(2): May or may not be conjugated to a chemical probe
RCSEGSFLLTTFPRPVTVEPMDQLDDEEGLPEKL

SEQ ID NO: 1790 - protein, 24 aa, Homo sapiens
  Table 3 sequence identifier: Q13200_C459
  MOD_RES (4)..(4): May or may not be conjugated to a chemical probe
RNECDPALALLSDYVLHNSNTMRL

SEQ ID NO: 1791 - protein, 25 aa, Homo sapiens
  Table 3 sequence identifier: Q9ULZ2_C269
  MOD_RES (9)..(9): May or may not be conjugated to a chemical probe
RGNLRPFICSTDENTGQEPSMEGRS

SEQ ID NO: 1792 - protein, 47 aa, Homo sapiens
  Table 3 sequence identifier: P78527_C3403
  MOD_RES (24)..(24): May or may not be conjugated to a chemical probe
RAFQHLSEAVQAAEEEAQPPSWSCGPAAGVIDAYMTLADFCDQQLRK

SEQ ID NO: 1793 - protein, 16 aa, Homo sapiens
  Table 3 sequence identifier: Q9NZ63_C145
  MOD_RES (6)..(6): May or may not be conjugated to a chemical probe
KNAEDCLYELPENIRV

SEQ ID NO: 1794 - protein, 38 aa, Homo sapiens
  Table 3 sequence identifier: P22234_C350
  MOD_RES (20)..(20): May or may not be conjugated to a chemical probe
RSNGLGPVMSGNTAYPVISCPPLTPDWGVQDVWSSLRL

SEQ ID NO: 1795 - protein, 11 aa, Homo sapiens
  Table 3 sequence identifier: Q9NX46_C132
  MOD_RES (2)..(2): May or may not be conjugated to a chemical probe
KCRDVFEPARA

SEQ ID NO: 1796 - protein, 21 aa, Homo sapiens
  Table 3 sequence identifier: Q6PJT7_C261
  MOD_RES (3)..(3): May or may not be conjugated to a chemical probe
RLCEPEVLNSLEETYSPFFRN

SEQ ID NO: 1797 - protein, 24 aa, Homo sapiens
  Table 3 sequence identifier: P52789_C909
  MOD_RES (22)..(22): May or may not be conjugated to a chemical probe
GAALITAVACRKGAALITAVACRI

SEQ ID NO: 1798 - protein, 34 aa, Homo sapiens
  Table 3 sequence identifier: O00148_C86
  MOD_RES (30)..(30): May or may not be conjugated to a chemical probe
RAIVDCGFEHPSEVQHECIPQAILGMDVLCQAKS

SEQ ID NO: 1799 - protein, 32 aa, Homo sapiens
  Table 3 sequence identifier: P48643_C302
  MOD_RES (10)..(10): May or may not be conjugated to a chemical probe
KETGANLAICQWGFDDEANHLLLQNNLPAVRW

SEQ ID NO: 1800 - protein, 37 aa, Homo sapiens
  Table 3 sequence identifier: Q9H6Z4_C203
  MOD_RES (21)..(21): May or may not be conjugated to a chemical probe
KALSQTVPSSGTNGVSLPADCTGAVPAASPDTAAWRS

SEQ ID NO: 1801 - protein, 12 aa, Homo sapiens
  Table 3 sequence identifier: P33991_C605
  MOD_RES (6)..(6): May or may not be conjugated to a chemical probe
KAGIICQLNART

SEQ ID NO: 1802 - protein, 11 aa, Homo sapiens
  Table 3 sequence identifier: Q13330_C229
  MOD_RES (5)..(5): May or may not be conjugated to a chemical probe
RALDCSSSVRQ

SEQ ID NO: 1803 - protein, 17 aa, Homo sapiens
  Table 3 sequence identifier: O95630_C264
  MOD_RES (3)..(3): May or may not be conjugated to a chemical probe
RLCPQFLQLASANTARG

SEQ ID NO: 1804 - protein, 9 aa, Homo sapiens
  Table 3 sequence identifier: P25786_C85
  MOD_RES (4)..(4): May or may not be conjugated to a chemical probe
RLLCNFMRQ

SEQ ID NO: 1805 - protein, 19 aa, Homo sapiens
  Table 3 sequence identifier: P42704_C1277
  MOD_RES (2)..(2): May or may not be conjugated to a chemical probe
RCGAIAEQTPILLLFLLRN

SEQ ID NO: 1806 - protein, 26 aa, Homo sapiens
  Table 3 sequence identifier: Q9NR50_C106
  MOD_RES (9)..(9): May or may not be conjugated to a chemical probe
KTDVLVLSCDLITDVALHEVVDLFRA

SEQ ID NO: 1807 - protein, 35 aa, Homo sapiens
  Table 3 sequence identifier: Q9H299_C71
  MOD_RES (14)..(14): May or may not be conjugated to a chemical probe
KATPPQIVNGDQYCGDYELFVEAVEQNTLQEFLKL

SEQ ID NO: 1808 - protein, 13 aa, Homo sapiens
  Table 3 sequence identifier: Q32MZ4_C14
  MOD_RES (5)..(5): May or may not be conjugated to a chemical probe
REIDCLSPEAQKL

SEQ ID NO: 1809 - protein, 11 aa, Homo sapiens
  Table 3 sequence identifier: Q13619_C633
  MOD_RES (8)..(8): May or may not be conjugated to a chemical probe
RTLQSLACGKA

SEQ ID NO: 1810 - protein, 23 aa, Homo sapiens
  Table 3 sequence identifier: O75832_C107
  MOD_RES (13)..(13): May or may not be conjugated to a chemical probe
KGAQVNAVNQNGCTPLHYAASKN

SEQ ID NO: 1811 - protein, 9 aa, Homo sapiens
  Table 3 sequence identifier: O75874_C379
  MOD_RES (6)..(6): May or may not be conjugated to a chemical probe
KDLAACIKG

SEQ ID NO: 1812 - protein, 29 aa, Homo sapiens
  Table 3 sequence identifier: P04075_C178
  MOD_RES (6)..(6): May or may not be conjugated to a chemical probe
RYASICQQNGIVPIVEPEILPDGDHDLKR

SEQ ID NO: 1813 - protein, 20 aa, Homo sapiens
  Table 3 sequence identifier: P34897_C412
  MOD_RES (15)..(15): May or may not be conjugated to a chemical probe
RVLELVSITANKNTCPGDRS

SEQ ID NO: 1814 - protein, 16 aa, Homo sapiens
  Table 3 sequence identifier: Q9Y490_C1939
  MOD_RES (7)..(7): May or may not be conjugated to a chemical probe
KAGALQCSPSDAYTKK

SEQ ID NO: 1815 - protein, 9 aa, Homo sapiens
  Table 3 sequence identifier: P26358_C896
  MOD_RES (6)..(6): May or may not be conjugated to a chemical probe
KFCVSCARL

SEQ ID NO: 1816 - protein, 23 aa, Homo sapiens
  Table 3 sequence identifier: P52701_C88
  MOD_RES (11)..(11): May or may not be conjugated to a chemical probe
RSVAPAAPTSCDFSPGDLVWAKM

SEQ ID NO: 1817 - protein, 21 aa, Homo sapiens
  Table 3 sequence identifier: Q96G03_C573
  MOD_RES (7)..(7): May or may not be conjugated to a chemical probe
KYYAELCAPPGNSDPEQLKKE

SEQ ID NO: 1818 - protein, 32 aa, Homo sapiens
  Table 3 sequence identifier: O00410_C1078
  MOD_RES (13)..(13): May or may not be conjugated to a chemical probe
RQVQTSGGLWTECIAQLSPEQQAAIQELLNSA

SEQ ID NO: 1819 - protein, 12 aa, Homo sapiens
  Table 3 sequence identifier: Q96FW1_C91
  MOD_RES (8)..(8): May or may not be conjugated to a chemical probe
KTRPDGNCFYRA

SEQ ID NO: 1820 - protein, 15 aa, Homo sapiens
  Table 3 sequence identifier: P02545_C591
  MOD_RES (8)..(8): May or may not be conjugated to a chemical probe
RTVLCGTCGQPADKA

SEQ ID NO: 1821 - protein, 27 aa, Homo sapiens
  Table 3 sequence identifier: Q7Z5K2_C94
  MOD_RES (2)..(2): May or may not be conjugated to a chemical probe
KCSSYSESSEAAQLEEVTSVLEANSKI

SEQ ID NO: 1822 - protein, 15 aa, Homo sapiens
  Table 3 sequence identifier: O75369_C991
  MOD_RES (6)..(6): May or may not be conjugated to a chemical probe
RKVVPCLVTPVTGRE

SEQ ID NO: 1823 - protein, 17 aa, Homo sapiens
  Table 3 sequence identifier: Q969T9_C80
  MOD_RES (3)..(3): May or may not be conjugated to a chemical probe
KDCEIKQPVFGANYIKG

SEQ ID NO: 1824 - protein, 32 aa, Homo sapiens
  Table 3 sequence identifier: Q9H773_C162
  MOD_RES (24)..(24): May or may not be conjugated to a chemical probe
RKYTELPHGAISEDQAVGPADIPCDSTGQTST

SEQ ID NO: 1825 - protein, 12 aa, Homo sapiens
  Table 3 sequence identifier: Q15424_C225
  MOD_RES (10)..(10): May or may not be conjugated to a chemical probe
KILDILGETCKS

SEQ ID NO: 1826 - protein, 23 aa, Homo sapiens
  Table 3 sequence identifier: P07900_C529
  MOD_RES (17)..(17): May or may not be conjugated to a chemical probe
KHGLEVIYMIEPIDEYCVQQLKE

SEQ ID NO: 1827 - protein, 11 aa, Homo sapiens
  Table 3 sequence identifier: P23396_C134
  MOD_RES (3)..(3): May or may not be conjugated to a chemical probe
KGCEVVVSGKL

SEQ ID NO: 1828 - protein, 11 aa, Homo sapiens
  Table 3 sequence identifier: Q8N9N8_C89
  MOD_RES (9)..(9): May or may not be conjugated to a chemical probe
KAEISFVLCKD

SEQ ID NO: 1829 - protein, 30 aa, Homo sapiens
  Table 3 sequence identifier: Q12888_C101
  MOD_RES (14)..(14): May or may not be conjugated to a chemical probe
KVADPVDSSNLDTCGSISQVIEQLPQPNRT

SEQ ID NO: 1830 - protein, 16 aa, Homo sapiens
  Table 3 sequence identifier: P61970_C114
  MOD_RES (9)..(9): May or may not be conjugated to a chemical probe
KNINDAWVCTNDMFRL

SEQ ID NO: 1831 - protein, 23 aa, Homo sapiens
  Table 3 sequence identifier: P18858_C895
  MOD_RES (19)..(19): May or may not be conjugated to a chemical probe
RVREDKQPEQATTSAQVACLYRK

SEQ ID NO: 1832 - protein, 12 aa, Homo sapiens
  Table 3 sequence identifier: P13639_C693
  MOD_RES (6)..(6): May or may not be conjugated to a chemical probe
KEGALCEENMRG

SEQ ID NO: 1833 - protein, 10 aa, Homo sapiens
  Table 3 sequence identifier: Q7L5D6_C160
  MOD_RES (6)..(6): May or may not be conjugated to a chemical probe
KEQNYCESRY

SEQ ID NO: 1834 - protein, 11 aa, Homo sapiens
  Table 3 sequence identifier: P63104_C25
  MOD_RES (8)..(8): May or may not be conjugated to a chemical probe
RYDDMAACMKS

SEQ ID NO: 1835 - protein, 10 aa, Homo sapiens
  Table 3 sequence identifier: Q14676_C26
  MOD_RES (2)..(2): May or may not be conjugated to a chemical probe
RCNVEPVGRL

SEQ ID NO: 1836 - protein, 16 aa, Homo sapiens
  Table 3 sequence identifier: Q15021_C596
  MOD_RES (14)..(14): May or may not be conjugated to a chemical probe
RESTGNMVTGQTVCKN

SEQ ID NO: 1837 - protein, 15 aa, Homo sapiens
  Table 3 sequence identifier: O43815_C765
  MOD_RES (2)..(2): May or may not be conjugated to a chemical probe
KCYIASAGADALAKV

SEQ ID NO: 1838 - protein, 17 aa, Homo sapiens
  Table 3 sequence identifier: Q13310_C339
  MOD_RES (7)..(7): May or may not be conjugated to a chemical probe
KGFGFVCFSSPEEATKA

SEQ ID NO: 1839 - protein, 17 aa, Homo sapiens
  Table 3 sequence identifier: P62241_C71
  MOD_RES (13)..(13): May or may not be conjugated to a chemical probe
RLDVGNFSWGSECCTRK

SEQ ID NO: 1840 - protein, 25 aa, Homo sapiens
  Table 3 sequence identifier: Q9Y263_C584
  MOD_RES (7)..(7): May or may not be conjugated to a chemical probe
KILSLICNSSSEKPTVQQLQILWKA

SEQ ID NO: 1841 - protein, 35 aa, Homo sapiens
  Table 3 sequence identifier: O95801_C238
  MOD_RES (7)..(7): May or may not be conjugated to a chemical probe
RLSEAACEDEDSASEGLGELFLDGLSTENPHGARL

SEQ ID NO: 1842 - protein, 11 aa, Homo sapiens
  Table 3 sequence identifier: Q14192_C254
  MOD_RES (3)..(3): May or may not be conjugated to a chemical probe
KKCSLSLVGRG

SEQ ID NO: 1843 - protein, 20 aa, Homo sapiens
  Table 3 sequence identifier: Q92841_C584
  MOD_RES (17)..(17): May or may not be conjugated to a chemical probe
RTTSSANNPNLMYQDECDRR

SEQ ID NO: 1844 - protein, 11 aa, Homo sapiens
  Table 3 sequence identifier: P07814_C1148
  MOD_RES (6)..(6): May or may not be conjugated to a chemical probe
KLNQWCNVVRW

SEQ ID NO: 1845 - protein, 14 aa, Homo sapiens
  Table 3 sequence identifier: P61586_C159
  MOD_RES (10)..(10): May or may not be conjugated to a chemical probe
RIGAFGYMECSAKT

SEQ ID NO: 1846 - protein, 11 aa, Homo sapiens
  Table 3 sequence identifier: Q08J23_C221
  MOD_RES (2)..(2): May or may not be conjugated to a chemical probe
RCYLLVHQAKR

SEQ ID NO: 1847 - protein, 22 aa, Homo sapiens
  Table 3 sequence identifier: Q9UER7_C699
  MOD_RES (15)..(15): May or may not be conjugated to a chemical probe
RVDSPSHGLVTSSLCIPSPARL

SEQ ID NO: 1848 - protein, 32 aa, Homo sapiens
  Table 3 sequence identifier: P05161_C78
  MOD_RES (22)..(22): May or may not be conjugated to a chemical probe
RVPLASQGLGPGSTVLLVVDKCDEPLSILVRN

SEQ ID NO: 1849 - protein, 25 aa, Homo sapiens
  Table 3 sequence identifier: P07741_C140
  MOD_RES (19)..(19): May or may not be conjugated to a chemical probe
RVVVVDDLLATGGTMNAACELLGRL

SEQ ID NO: 1850 - protein, 19 aa, Homo sapiens
  Table 3 sequence identifier: P08238_C412
  MOD_RES (2)..(2): May or may not be conjugated to a chemical probe
KCLELFSELAEDKENYKKF

SEQ ID NO: 1851 - protein, 11 aa, Homo sapiens
  Table 3 sequence identifier: P53597_C60
  MOD_RES (4)..(4): May or may not be conjugated to a chemical probe
KIICQGFTGKQ

SEQ ID NO: 1852 - protein, 13 aa, Homo sapiens
  Table 3 sequence identifier: Q9UPY8_C182
  MOD_RES (9)..(9): May or may not be conjugated to a chemical probe
RLSNVAPPCILRK

SEQ ID NO: 1853 - protein, 10 aa, Homo sapiens
  Table 3 sequence identifier: P61247_C139
  MOD_RES (4)..(4): May or may not be conjugated to a chemical probe
RLFCVGFTKK

SEQ ID NO: 1854 - protein, 20 aa, Homo sapiens
  Table 3 sequence identifier: Q9Y2L1_C799
  MOD_RES (11)..(11): May or may not be conjugated to a chemical probe
RLLAVAIGADCTYPELTDKH

SEQ ID NO: 1855 - protein, 31 aa, Homo sapiens
  Table 3 sequence identifier: P23921_C352
  MOD_RES (13)..(13): May or may not be conjugated to a chemical probe
KRVETNQDWSLMCPNECPGLDEVWGEEFEKL

SEQ ID NO: 1856 - protein, 28 aa, Homo sapiens
  Table 3 sequence identifier: P07954_C333
  MOD_RES (23)..(23): May or may not be conjugated to a chemical probe
KFEALAAHDALVELSGAMNTTACSLMKI

SEQ ID NO: 1857 - protein, 14 aa, Homo sapiens
  Table 3 sequence identifier: O00429_C361
  MOD_RES (9)..(9): May or may not be conjugated to a chemical probe
KYIETSELCGGARI

SEQ ID NO: 1858 - protein, 21 aa, Homo sapiens
  Table 3 sequence identifier: P00491_C31
  MOD_RES (10)..(10): May or may not be conjugated to a chemical probe
KHRPQVAIICGSGLGGLTDKL

SEQ ID NO: 1859 - protein, 8 aa, Homo sapiens
  Table 3 sequence identifier: P61927_C37
  MOD_RES (2)..(2): May or may not be conjugated to a chemical probe
KCGYPAKR

SEQ ID NO: 1860 - protein, 14 aa, Homo sapiens
  Table 3 sequence identifier: Q16543_C336
  MOD_RES (2)..(2): May or may not be conjugated to a chemical probe
RCIDSGLWVPNSKA

SEQ ID NO: 1861 - protein, 12 aa, Homo sapiens
  Table 3 sequence identifier: P49753_C401
  MOD_RES (10)..(10): May or may not be conjugated to a chemical probe
KSEFYANEACKR

SEQ ID NO: 1862 - protein, 23 aa, Homo sapiens
  Table 3 sequence identifier: Q9BSH4_C256
  MOD_RES (13)..(13): May or may not be conjugated to a chemical probe
KKLDSLGLCSVSCALEFIPNSKV

SEQ ID NO: 1863 - protein, 21 aa, Homo sapiens
  Table 3 sequence identifier: P43686_C379
  MOD_RES (11)..(11): May or may not be conjugated to a chemical probe
KISGADINSICQESGMLAVRE

SEQ ID NO: 1864 - protein, 17 aa, Homo sapiens
  Table 3 sequence identifier: O75717_C285
  MOD_RES (14)..(14): May or may not be conjugated to a chemical probe
KGYAICGLAWHPTCGRI

SEQ ID NO: 1865 - protein, 14 aa, Homo sapiens
  Table 3 sequence identifier: P36776_C520
  MOD_RES (4)..(4): May or may not be conjugated to a chemical probe
KILCFYGPPGVGKT

SEQ ID NO: 1866 - protein, 20 aa, Homo sapiens
  Table 3 sequence identifier: P36776_C637
  MOD_RES (6)..(6): May or may not be conjugated to a chemical probe
KVLFICTANVTDTIPEPLRD

SEQ ID NO: 1867 - protein, 12 aa, Homo sapiens
  Table 3 sequence identifier: Q16666_C637
  MOD_RES (10)..(10): May or may not be conjugated to a chemical probe
KIIAIANYVCRN

SEQ ID NO: 1868 - protein, 31 aa, Homo sapiens
  Table 3 sequence identifier: Q92619_C1020
  MOD_RES (29)..(29): May or may not be conjugated to a chemical probe
RAEVVVQVPYLEAGEAVVYPLQEAAADGCRE

SEQ ID NO: 1869 - protein, 33 aa, Homo sapiens
  Table 3 sequence identifier: Q9P289_C77
  MOD_RES (25)..(25): May or may not be conjugated to a chemical probe
KIIDLEEAEDEIEDIQQEITVLSQCDSSYVTKY

SEQ ID NO: 1870 - protein, 8 aa, Homo sapiens
  Table 3 sequence identifier: H3BVE0_C63
  MOD_RES (2)..(2): May or may not be conjugated to a chemical probe
RCSCSFRV

SEQ ID NO: 1871 - protein, 14 aa, Homo sapiens
  Table 3 sequence identifier: P60891_C91
  MOD_RES (8)..(8): May or may not be conjugated to a chemical probe
RVTAVIPCFPYARQ

SEQ ID NO: 1872 - protein, 32 aa, Homo sapiens
  Table 3 sequence identifier: Q01813_C343
  MOD_RES (20)..(20): May or may not be conjugated to a chemical probe
RMGVEAVIALLEATPDTPACVVSLNGNHAVRL

SEQ ID NO: 1873 - protein, 12 aa, Homo sapiens
  Table 3 sequence identifier: P04632_C144
  MOD_RES (10)..(10): May or may not be conjugated to a chemical probe
KTDGFGIDTCRS

SEQ ID NO: 1874 - protein, 24 aa, Homo sapiens
  Table 3 sequence identifier: Q7Z6Z7_C790
  MOD_RES (16)..(16): May or may not be conjugated to a chemical probe
KFVESILSNNTTDDHCQEFVNQKG

SEQ ID NO: 1875 - protein, 20 aa, Homo sapiens
  Table 3 sequence identifier: O14933_C102
  MOD_RES (3)..(3): May or may not be conjugated to a chemical probe
KTCQVLEALNVLVNRPNIRE

SEQ ID NO: 1876 - protein, 33 aa, Homo sapiens
  Table 3 sequence identifier: Q8WUA4_C212
  MOD_RES (27)..(27): May or may not be conjugated to a chemical probe
RAAQVALLYLQELAEELSTALPAPVSCPEGPKV

SEQ ID NO: 1877 - protein, 15 aa, Homo sapiens
  Table 3 sequence identifier: Q9UJU6_C127
  MOD_RES (10)..(10): May or may not be conjugated to a chemical probe
RAEEDVEPECIMEKV

SEQ ID NO: 1878 - protein, 19 aa, Homo sapiens
  Table 3 sequence identifier: P21333_C2199
  MOD_RES (16)..(16): May or may not be conjugated to a chemical probe
KTHEAEIVEGENHTYCIRF

SEQ ID NO: 1879 - protein, 21 aa, Homo sapiens
  Table 3 sequence identifier: P45880_C47
  MOD_RES (3)..(3): May or may not be conjugated to a chemical probe
KSCSGVEFSTSGSSNTDTGKV

SEQ ID NO: 1880 - protein, 9 aa, Homo sapiens
  Table 3 sequence identifier: P23396_C119
  MOD_RES (3)..(3): May or may not be conjugated to a chemical probe
RACYGVLRF

SEQ ID NO: 1881 - protein, 17 aa, Homo sapiens
  Table 3 sequence identifier: P13489_C30
  MOD_RES (12)..(12): May or may not be conjugated to a chemical probe
RWAELLPLLQQCQVVRL

SEQ ID NO: 1882 - protein, 20 aa, Homo sapiens
  Table 3 sequence identifier: P17676_C248
  MOD_RES (7)..(7): May or may not be conjugated to a chemical probe
KAPPTACYAGAAPAPSQVKS

SEQ ID NO: 1883 - protein, 12 aa, Homo sapiens
  Table 3 sequence identifier: Q92974_C478
  MOD_RES (7)..(7): May or may not be conjugated to a chemical probe
KLIHDGCLLWKT

SEQ ID NO: 1884 - protein, 34 aa, Homo sapiens
  Table 3 sequence identifier: O75995_C351
  MOD_RES (5)..(5): May or may not be conjugated to a chemical probe
RDSGCFEGSESGRDDAELAGTEEQLQGLSLAGAP

SEQ ID NO: 1885 - protein, 14 aa, Homo sapiens
  Table 3 sequence identifier: P61978_C184
  MOD_RES (6)..(6): May or may not be conjugated to a chemical probe
KLFQECCPHSTDRV

SEQ ID NO: 1886 - protein, 14 aa, Homo sapiens
  Table 3 sequence identifier: Q15149_C3295
  MOD_RES (11)..(11): May or may not be conjugated to a chemical probe
KSHRVPLDVACARG

SEQ ID NO: 1887 - protein, 16 aa, Homo sapiens
  Table 3 sequence identifier: P11142_C574
  MOD_RES (6)..(6): May or may not be conjugated to a chemical probe
KILDKCNEIINWLDKN

SEQ ID NO: 1888 - protein, 24 aa, Homo sapiens
  Table 3 sequence identifier: P21964_C223
  MOD_RES (12)..(12): May or may not be conjugated to a chemical probe
KGTVLLADNVICPGAPDFLAHVRG

SEQ ID NO: 1889 - protein, 31 aa, Homo sapiens
  Table 3 sequence identifier: Q96TA1_C466
  MOD_RES (29)..(29): May or may not be conjugated to a chemical probe
REQMDNAVYTFETLLHQELGKGPTKEELCKS

SEQ ID NO: 1890 - protein, 22 aa, Homo sapiens
  Table 3 sequence identifier: Q9NVG8_C145
  MOD_RES (7)..(7): May or may not be conjugated to a chemical probe
RATDYPCLLILDPQNEFETLRK

SEQ ID NO: 1891 - protein, 22 aa, Homo sapiens
  Table 3 sequence identifier: Q96EV2_C726
  MOD_RES (2)..(2): May or may not be conjugated to a chemical probe
RCSATPSAQVKPIVSASPPSRA

SEQ ID NO: 1892 - protein, 11 aa, Homo sapiens
  Table 3 sequence identifier: P00505_C295
  MOD_RES (9)..(9): May or may not be conjugated to a chemical probe
RVGAFTMVCKD

SEQ ID NO: 1893 - protein, 9 aa, Homo sapiens
  Table 3 sequence identifier: Q92945_C436
  MOD_RES (2)..(2): May or may not be conjugated to a chemical probe
KCGLVIGRG

SEQ ID NO: 1894 - protein, 16 aa, Homo sapiens
  Table 3 sequence identifier: P46734_C227
  MOD_RES (7)..(7): May or may not be conjugated to a chemical probe
KTMDAGCKPYMAPERI

SEQ ID NO: 1895 - protein, 43 aa, Homo sapiens
  Table 3 sequence identifier: P68104_C370
  MOD_RES (41)..(41): May or may not be conjugated to a chemical probe
KNDPPMEAAGFTAQVIILNHPGQISAGYAPVLDCHTAHIACKF

SEQ ID NO: 1896 - protein, 17 aa, Homo sapiens
  Table 3 sequence identifier: Q14204_C4216
  MOD_RES (4)..(4): May or may not be conjugated to a chemical probe
RSACDTVDTWLDDTAKG

SEQ ID NO: 1897 - protein, 10 aa, Homo sapiens
  Table 3 sequence identifier: P55060_C939
  MOD_RES (6)..(6): May or may not be conjugated to a chemical probe
KLSTACPGRV

SEQ ID NO: 1898 - protein, 9 aa, Homo sapiens
  Table 3 sequence identifier: Q8WYJ6_C293
  MOD_RES (2)..(2): May or may not be conjugated to a chemical probe
RCLQSLARP

SEQ ID NO: 1899 - protein, 9 aa, Homo sapiens
  Table 3 sequence identifier: Q04760_C61
  MOD_RES (2)..(2): May or may not be conjugated to a chemical probe
KCDFPIMKF

SEQ ID NO: 1900 - protein, 19 aa, Homo sapiens
  Table 3 sequence identifier: P54105_C73
  MOD_RES (6)..(6): May or may not be conjugated to a chemical probe
RDRSDCLGEHLYVMVNAKF

SEQ ID NO: 1901 - protein, 38 aa, Homo sapiens
  Table 3 sequence identifier: Q99439_C274
  MOD_RES (3)..(3): May or may not be conjugated to a chemical probe
KYCPQGTVADGAPSGTGDCPDPGEVPEYPPYYQEEAGY

SEQ ID NO: 1902 - protein, 14 aa, Homo sapiens
  Table 3 sequence identifier: Q15054_C137
  MOD_RES (7)..(7): May or may not be conjugated to a chemical probe
KFSAIQCAAAVPRA

SEQ ID NO: 1903 - protein, 25 aa, Homo sapiens
  Table 3 sequence identifier: Q14232_C169
  MOD_RES (4)..(4): May or may not be conjugated to a chemical probe
KALCHLNVPVTVVLDAAVGYIMEKA

SEQ ID NO: 1904 - protein, 31 aa, Homo sapiens
  Table 3 sequence identifier: Q8TB45_C284
  MOD_RES (7)..(7): May or may not be conjugated to a chemical probe
RSSMSSCGSSGYFSSSPTLSSSPPVLCNPKS

SEQ ID NO: 1905 - protein, 26 aa, Homo sapiens
  Table 3 sequence identifier: P18031_C92
  MOD_RES (14)..(14): May or may not be conjugated to a chemical probe
RSYILTQGPLPNTCGHFWEMVWEQKS

SEQ ID NO: 1906 - protein, 17 aa, Homo sapiens
  Table 3 sequence identifier: O60343_C74
  MOD_RES (10)..(10): May or may not be conjugated to a chemical probe
RSQKPEAGGCGAPAARE

SEQ ID NO: 1907 - protein, 18 aa, Homo sapiens
  Table 3 sequence identifier: Q9NQW6_C353
  MOD_RES (9)..(9): May or may not be conjugated to a chemical probe
KGELSREICLQSQSKDKS

SEQ ID NO: 1908 - protein, 28 aa, Homo sapiens
  Table 3 sequence identifier: Q86U90_C99
  MOD_RES (22)..(22): May or may not be conjugated to a chemical probe
RAGAVVAVPTDTLYGLACAASCSAALRA

SEQ ID NO: 1909 - protein, 31 aa, Homo sapiens
  Table 3 sequence identifier: Q9Y3D2_C45
  MOD_RES (24)..(24): May or may not be conjugated to a chemical probe
RGQAGGGGPGTGPGLGEAGSLATCELPLAKS

SEQ ID NO: 1910 - protein, 10 aa, Homo sapiens
  Table 3 sequence identifier: Q9P258_C144
  MOD_RES (4)..(4): May or may not be conjugated to a chemical probe
RYGCLAGVRV

SEQ ID NO: 1911 - protein, 19 aa, Homo sapiens
  Table 3 sequence identifier: P56192_C441
  MOD_RES (3)..(3): May or may not be conjugated to a chemical probe
RSCPVVQSSQHLFLDLPKL

SEQ ID NO: 1912 - protein, 23 aa, Homo sapiens
  Table 3 sequence identifier: P31751_C311
  MOD_RES (4)..(4): May or may not be conjugated to a chemical probe
KTFCGTPEYLAPEVLEDNDYGRA

SEQ ID NO: 1913 - protein, 23 aa, Homo sapiens
  Table 3 sequence identifier: O00410_C915
  MOD_RES (15)..(15): May or may not be conjugated to a chemical probe
KYAEYFLRPMLQYVCDNSPEVRQ

SEQ ID NO: 1914 - protein, 26 aa, Homo sapiens
  Table 3 sequence identifier: Q53ET0_C515
  MOD_RES (13)..(13): May or may not be conjugated to a chemical probe
KSLQQPGLPSQSCSVQSSGGQPPGRQ

SEQ ID NO: 1915 - protein, 39 aa, Homo sapiens
  Table 3 sequence identifier: P29401_C417
  MOD_RES (17)..(17): May or may not be conjugated to a chemical probe
RMAAISESNINLCGSHCGVSIGEDGPSQMALEDLAMFRS

SEQ ID NO: 1916 - protein, 12 aa, Homo sapiens
  Table 3 sequence identifier: Q9UPN9_C461
  MOD_RES (4)..(4): May or may not be conjugated to a chemical probe
RFHCDPTFWAKN

SEQ ID NO: 1917 - protein, 14 aa, Homo sapiens
  Table 3 sequence identifier: P16152_C227
  MOD_RES (8)..(8): May or may not be conjugated to a chemical probe
KILLNACCPGWVRT

SEQ ID NO: 1918 - protein, 28 aa, Homo sapiens
  Table 3 sequence identifier: P49419_C478
  MOD_RES (5)..(5): May or may not be conjugated to a chemical probe
KGSDCGIVNVNIPTSGAEIGGAFGGEKH

SEQ ID NO: 1919 - protein, 28 aa, Homo sapiens
  Table 3 sequence identifier: Q9BX40_C310
  MOD_RES (23)..(23): May or may not be conjugated to a chemical probe
KDLAVVTQSAEAPAEEDLLGPNCYYDKS

SEQ ID NO: 1920 - protein, 12 aa, Homo sapiens
  Table 3 sequence identifier: Q93009_C315
  MOD_RES (4)..(4): May or may not be conjugated to a chemical probe
KGTCVEGTIPKL

SEQ ID NO: 1921 - protein, 35 aa, Homo sapiens
  Table 3 sequence identifier: Q9P0L0_C60
  MOD_RES (4)..(4): May or may not be conjugated to a chemical probe
RRYCVRPNSGIIDPGSTVTVSVMLQPFDYDPNEKS

SEQ ID NO: 1922 - protein, 26 aa, Homo sapiens
  Table 3 sequence identifier: Q9Y617_C291
  MOD_RES (18)..(18): May or may not be conjugated to a chemical probe
KSQTIYEIIDNSQGFYVCPVEPQNRS

SEQ ID NO: 1923 - protein, 19 aa, Homo sapiens
  Table 3 sequence identifier: Q5U5X0_C97
  MOD_RES (12)..(12): May or may not be conjugated to a chemical probe
RKDLLVENVPYCDAPTQKQ

SEQ ID NO: 1924 - protein, 11 aa, Homo sapiens
  Table 3 sequence identifier: O75390_C101
  MOD_RES (8)..(8): May or may not be conjugated to a chemical probe
RGFSIPECQKL

SEQ ID NO: 1925 - protein, 33 aa, Homo sapiens
  Table 3 sequence identifier: P53602_C386
  MOD_RES (19)..(19): May or may not be conjugated to a chemical probe
KYIIVTQVGPGPQILDDPCAHLLGPDGLPKPAA

SEQ ID NO: 1926 - protein, 12 aa, Homo sapiens
  Table 3 sequence identifier: P60953_C157
  MOD_RES (5)..(5): May or may not be conjugated to a chemical probe
KYVECSALTQKG

SEQ ID NO: 1927 - protein, 38 aa, Homo sapiens
  Table 3 sequence identifier: P09936_C47
  MOD_RES (21)..(21): May or may not be conjugated to a chemical probe
RFVDVLGLEEESLGSVPAPACALLLLFPLTAQHENFRK

SEQ ID NO: 1928 - protein, 14 aa, Homo sapiens
  Table 3 sequence identifier: P21333_C1018
  MOD_RES (12)..(12): May or may not be conjugated to a chemical probe
KIVGPSGAAVPCKV

SEQ ID NO: 1929 - protein, 16 aa, Homo sapiens
  Table 3 sequence identifier: O00267_C740
  MOD_RES (8)..(8): May or may not be conjugated to a chemical probe
RVELHSTCQTISVDRQ

SEQ ID NO: 1930 - protein, 10 aa, Homo sapiens
  Table 3 sequence identifier: P42166_C518
  MOD_RES (8)..(8): May or may not be conjugated to a chemical probe
RQLPSLACKY

SEQ ID NO: 1931 - protein, 20 aa, Homo sapiens
  Table 3 sequence identifier: P41091_C105
  MOD_RES (3)..(3): May or may not be conjugated to a chemical probe
RSCGSSTPDEFPTDIPGTKG

SEQ ID NO: 1932 - protein, 28 aa, Homo sapiens
  Table 3 sequence identifier: Q92973_C297
  MOD_RES (26)..(26): May or may not be conjugated to a chemical probe
RTQDQDENVALEACEFWLTLAEQPICKD

SEQ ID NO: 1933 - protein, 19 aa, Homo sapiens
  Table 3 sequence identifier: Q15149_C3336
  MOD_RES (2)..(2): May or may not be conjugated to a chemical probe
RCRPDQLTGLSLLPLSEKA

SEQ ID NO: 1934 - protein, 22 aa, Homo sapiens
  Table 3 sequence identifier: P22314_C278
  MOD_RES (11)..(11): May or may not be conjugated to a chemical probe
KVLGPYTFSICDTSNFSDYIRG

SEQ ID NO: 1935 - protein, 18 aa, Homo sapiens
  Table 3 sequence identifier: P38117_C42
  MOD_RES (8)..(8): May or may not be conjugated to a chemical probe
KHSMNPFCEIAVEEAVRL

SEQ ID NO: 1936 - protein, 12 aa, Homo sapiens
  Table 3 sequence identifier: P62316_C46
  MOD_RES (10)..(10): May or may not be conjugated to a chemical probe
KNNTQVLINCRN

SEQ ID NO: 1937 - protein, 17 aa, Homo sapiens
  Table 3 sequence identifier: P48735_C154
  MOD_RES (15)..(15): May or may not be conjugated to a chemical probe
RNILGGTVFREPIICKN

SEQ ID NO: 1938 - protein, 33 aa, Homo sapiens
  Table 3 sequence identifier: O00151_C45
  MOD_RES (8)..(8): May or may not be conjugated to a chemical probe
KAALANLCIGDVITAIDGENTSNMTHLEAQNRI

SEQ ID NO: 1939 - protein, 18 aa, Homo sapiens
  Table 3 sequence identifier: Q8IUD2_C258
  MOD_RES (6)..(6): May or may not be conjugated to a chemical probe
RTGEPCVAELTEENFQRL

SEQ ID NO: 1940 - protein, 10 aa, Homo sapiens
  Table 3 sequence identifier: P55210_C186
  MOD_RES (8)..(8): May or may not be conjugated to a chemical probe
KLFFIQACRG

SEQ ID NO: 1941 - protein, 10 aa, Homo sapiens
  Table 3 sequence identifier: Q9BY77_C338
  MOD_RES (2)..(2): May or may not be conjugated to a chemical probe
RCLDGQPMKC

SEQ ID NO: 1942 - protein, 22 aa, Homo sapiens
  Table 3 sequence identifier: Q13501_C131
  MOD_RES (13)..(13): May or may not be conjugated to a chemical probe
RNMVHPNVICDGCNGPVVGTRY

SEQ ID NO: 1943 - protein, 14 aa, Homo sapiens
  Table 3 sequence identifier: Q96ST2_C749
  MOD_RES (11)..(11): May or may not be conjugated to a chemical probe
KALRPGDPGFCARA

SEQ ID NO: 1944 - protein, 26 aa, Homo sapiens
  Table 3 sequence identifier: P41250_C180
  MOD_RES (15)..(15): May or may not be conjugated to a chemical probe
RQHFIQEEQILEIDCTMLTPEPVLKT

SEQ ID NO: 1945 - protein, 14 aa, Homo sapiens
  Table 3 sequence identifier: Q96EB6_C67
  MOD_RES (3)..(3): May or may not be conjugated to a chemical probe
RGCPGAAAAALWRE

SEQ ID NO: 1946 - protein, 19 aa, Homo sapiens
  Table 3 sequence identifier: P23921_C492
  MOD_RES (14)..(14): May or may not be conjugated to a chemical probe
KIIDINYYPVPEACLSNKR

SEQ ID NO: 1947 - protein, 25 aa, Homo sapiens
  Table 3 sequence identifier: Q53H96_C235
  MOD_RES (5)..(5): May or may not be conjugated to a chemical probe
RSDVCTPGGTTIYGLHALEQGGLRA

SEQ ID NO: 1948 - protein, 9 aa, Homo sapiens
  Table 3 sequence identifier: B9A064_C213
  MOD_RES (8)..(8): May or may not be conjugated to a chemical probe
KTVAPTECS

SEQ ID NO: 1949 - protein, 21 aa, Homo sapiens
  Table 3 sequence identifier: P49588_C947
  MOD_RES (5)..(5): May or may not be conjugated to a chemical probe
KNVGCLQEALQLATSFAQLRL

SEQ ID NO: 1950 - protein, 20 aa, Homo sapiens
  Table 3 sequence identifier: P25398_C56
  MOD_RES (12)..(12): May or may not be conjugated to a chemical probe
RQAHLCVLASNCDEPMYVKL

SEQ ID NO: 1951 - protein, 21 aa, Homo sapiens
  Table 3 sequence identifier: P28066_C165
  MOD_RES (17)..(17): May or may not be conjugated to a chemical probe
KGPQLFHMDPSGTFVQCDARA

SEQ ID NO: 1952 - protein, 9 aa, Homo sapiens
  Table 3 sequence identifier: P46937_C343
  MOD_RES (2)..(2): May or may not be conjugated to a chemical probe
KCQELALRS

SEQ ID NO: 1953 - protein, 21 aa, Homo sapiens
  Table 3 sequence identifier: Q16836_C211
  MOD_RES (10)..(10): May or may not be conjugated to a chemical probe
KALGKHPVSCKDTPGFIVNRL

SEQ ID NO: 1954 - protein, 22 aa, Homo sapiens
  Table 3 sequence identifier: P30626_C57
  MOD_RES (2)..(2): May or may not be conjugated to a chemical probe
RCLTQSGIAGGYKPFNLETCRL

SEQ ID NO: 1955 - protein, 19 aa, Homo sapiens
  Table 3 sequence identifier: P49023_C108
  MOD_RES (16)..(16): May or may not be conjugated to a chemical probe
KTSSVSNPQDSVGSPCSRV

SEQ ID NO: 1956 - protein, 17 aa, Homo sapiens
  Table 3 sequence identifier: P35270_C159
  MOD_RES (10)..(10): May or may not be conjugated to a chemical probe
RTVVNISSLCALQPFKG

SEQ ID NO: 1957 - protein, 42 aa, Homo sapiens
  Table 3 sequence identifier: P02545_C588
  MOD_RES (5)..(5): May or may not be conjugated to a chemical probe
RTVLCGTCGQPADKASASGSGAQVGGPISSGSSASSVTVTRS

SEQ ID NO: 1958 - protein, 16 aa, Homo sapiens
  Table 3 sequence identifier: P08621_C39
  MOD_RES (8)..(8): May or may not be conjugated to a chemical probe
KHHNQPYCGIAPYIRE

SEQ ID NO: 1959 - protein, 9 aa, Homo sapiens
  Table 3 sequence identifier: Q14566_C91
  MOD_RES (7)..(7): May or may not be conjugated to a chemical probe
RVYPYLCRA

SEQ ID NO: 1960 - protein, 10 aa, Homo sapiens
  Table 3 sequence identifier: Q14103_C226
  MOD_RES (4)..(4): May or may not be conjugated to a chemical probe
RGFCFITFKE

SEQ ID NO: 1961 - protein, 14 aa, Homo sapiens
  Table 3 sequence identifier: P26641_C194
  MOD_RES (6)..(6): May or may not be conjugated to a chemical probe
RWFLTCINQPQFRA

SEQ ID NO: 1962 - protein, 17 aa, Homo sapiens
  Table 3 sequence identifier: Q9UK41_C128
  MOD_RES (2)..(2): May or may not be conjugated to a chemical probe
RCIADVVSLFITVMDKL

SEQ ID NO: 1963 - protein, 31 aa, Homo sapiens
  Table 3 sequence identifier: Q9BQ52_C441
  MOD_RES (7)..(7): May or may not be conjugated to a chemical probe
RDAIITCNPEEFIVEALQLPNFQQSVQEYRR

SEQ ID NO: 1964 - protein, 21 aa, Homo sapiens
  Table 3 sequence identifier: P04632_C232
  MOD_RES (17)..(17): May or may not be conjugated to a chemical probe
RYSDESGNMDFDNFISCLVRL

SEQ ID NO: 1965 - protein, 34 aa, Homo sapiens
  Table 3 sequence identifier: P09936_C90
  MOD_RES (8)..(8): May or may not be conjugated to a chemical probe
KQTIGNSCGTIGLIHAVANNQDKLGFEDGSVLKQ

SEQ ID NO: 1966 - protein, 32 aa, Homo sapiens
  Table 3 sequence identifier: P21333_C1912
  MOD_RES (6)..(6): May or may not be conjugated to a chemical probe
KAEISCTDNQDGTCSVSYLPVLPGDYSILVKY

SEQ ID NO: 1967 - protein, 31 aa, Homo sapiens
  Table 3 sequence identifier: P30566_C340
  MOD_RES (3)..(3): May or may not be conjugated to a chemical probe
RICLAEAFLTADTILNTLQNISEGLVVYPKV

SEQ ID NO: 1968 - protein, 16 aa, Homo sapiens
  Table 3 sequence identifier: O95983_C215
  MOD_RES (14)..(14): May or may not be conjugated to a chemical probe
KNPGVWLNTTQPLCKA

SEQ ID NO: 1969 - protein, 9 aa, Homo sapiens
  Table 3 sequence identifier: P40925_C251
  MOD_RES (4)..(4): May or may not be conjugated to a chemical probe
KAICDHVRD

SEQ ID NO: 1970 - protein, 38 aa, Homo sapiens
  Table 3 sequence identifier: P78417_C90
  MOD_RES (26)..(26): May or may not be conjugated to a chemical probe
KKNPFGLVPVLENSQGQLIYESAITCEYLDEAYPGKKL

SEQ ID NO: 1971 - protein, 20 aa, Homo sapiens
  Table 3 sequence identifier: P17655_C82
  MOD_RES (7)..(7): May or may not be conjugated to a chemical probe
KRPTEICADPQFIIGGATRT

SEQ ID NO: 1972 - protein, 19 aa, Homo sapiens
  Table 3 sequence identifier: O75688_C172
  MOD_RES (15)..(15): May or may not be conjugated to a chemical probe
RNGQVCFSTQDHKPCNPRE

SEQ ID NO: 1973 - protein, 27 aa, Homo sapiens
  Table 3 sequence identifier: Q09666_C2806
  MOD_RES (15)..(15): May or may not be conjugated to a chemical probe
KADIDVSGPKVDVECPDVNIEGPEGKW

SEQ ID NO: 1974 - protein, 12 aa, Homo sapiens
  Table 3 sequence identifier: P62140_C126
  MOD_RES (6)..(6): May or may not be conjugated to a chemical probe
RGNHECASINRI

SEQ ID NO: 1975 - protein, 26 aa, Homo sapiens
  Table 3 sequence identifier: P54687_C8
  MOD_RES (7)..(7): May or may not be conjugated to a chemical probe
KDCSNGCSAECTGEGGSKEVVGTFKA

SEQ ID NO: 1976 - protein, 22 aa, Homo sapiens
  Table 3 sequence identifier: O60934_C487
  MOD_RES (6)..(6): May or may not be conjugated to a chemical probe
RIETSCSLLEQTQPATPSLWKN

SEQ ID NO: 1977 - protein, 21 aa, Homo sapiens
  Table 3 sequence identifier: Q9NZT2_C443
  MOD_RES (19)..(19): May or may not be conjugated to a chemical probe
RTGTQEVGGQDPGEAVQPCRQ

SEQ ID NO: 1978 - protein, 17 aa, Homo sapiens
  Table 3 sequence identifier: P52789_C834
  MOD_RES (6)..(6): May or may not be conjugated to a chemical probe
RAAQLCGAGMAAVVDRI

SEQ ID NO: 1979 - protein, 10 aa, Homo sapiens
  Table 3 sequence identifier: P35579_C671
  MOD_RES (2)..(2): May or may not be conjugated to a chemical probe
RCIIPNHEKK

SEQ ID NO: 1980 - protein, 11 aa, Homo sapiens
  Table 3 sequence identifier: Q9HAV7_C108
  MOD_RES (9)..(9): May or may not be conjugated to a chemical probe
KLYGIQAFCKD

SEQ ID NO: 1981 - protein, 14 aa, Homo sapiens
  Table 3 sequence identifier: O43175_C18
  MOD_RES (11)..(11): May or may not be conjugated to a chemical probe
KVLISDSLDPCCRK

SEQ ID NO: 1982 - protein, 16 aa, Homo sapiens
  Table 3 sequence identifier: O43175_C295
  MOD_RES (2)..(2): May or may not be conjugated to a chemical probe
RCGEEIAVQFVDMVKG

SEQ ID NO: 1983 - protein, 17 aa, Homo sapiens
  Table 3 sequence identifier: P12004_C162
  MOD_RES (14)..(14): May or may not be conjugated to a chemical probe
RDLSHIGDAVVISCAKD

SEQ ID NO: 1984 - protein, 8 aa, Homo sapiens
  Table 3 sequence identifier: O75531_C85
  MOD_RES (4)..(4): May or may not be conjugated to a chemical probe
REWCDAFL

SEQ ID NO: 1985 - protein, 21 aa, Homo sapiens
  Table 3 sequence identifier: P46940_C494
  MOD_RES (18)..(18): May or may not be conjugated to a chemical probe
KQLSSSVTGLTNIEEENCQRY

SEQ ID NO: 1986 - protein, 25 aa, Homo sapiens
  Table 3 sequence identifier: P11586_C195
  MOD_RES (21)..(21): May or may not be conjugated to a chemical probe
KIVGAPMHDLLLWNNATVTTCHSKT

SEQ ID NO: 1987 - protein, 11 aa, Homo sapiens
  Table 3 sequence identifier: Q7Z5L9_C65
  MOD_RES (5)..(5): May or may not be conjugated to a chemical probe
RAHGCFPEGRS

SEQ ID NO: 1988 - protein, 16 aa, Homo sapiens
  Table 3 sequence identifier: Q9Y5K6_C595
  MOD_RES (9)..(9): May or may not be conjugated to a chemical probe
RAQIIELLCIVEALKK

SEQ ID NO: 1989 - protein, 15 aa, Homo sapiens
  Table 3 sequence identifier: Q9Y5L0_C511
  MOD_RES (4)..(4): May or may not be conjugated to a chemical probe
KGLCEKPLASAAAKA

SEQ ID NO: 1990 - protein, 29 aa, Homo sapiens
  Table 3 sequence identifier: Q9NZN4_C138
  MOD_RES (4)..(4): May or may not be conjugated to a chemical probe
RFMCAQLPNQVLESISIIDTPGILSGAKQ

SEQ ID NO: 1991 - protein, 27 aa, Homo sapiens
  Table 3 sequence identifier: Q13813_C2233
  MOD_RES (9)..(9): May or may not be conjugated to a chemical probe
RTYLLDGSCMVEESGTLESQLEATKRK

SEQ ID NO: 1992 - protein, 12 aa, Homo sapiens
  Table 3 sequence identifier: P62910_C91
  MOD_RES (9)..(9): May or may not be conjugated to a chemical probe
KELEVLLMCNKS

SEQ ID NO: 1993 - protein, 41 aa, Homo sapiens
  Table 3 sequence identifier: O76003_C229
  MOD_RES (38)..(38): May or may not be conjugated to a chemical probe
KAYSSWPTYPQLYVSGELIGGLDIIKELEASEELDTICPKA

SEQ ID NO: 1994 - protein, 26 aa, Homo sapiens
  Table 3 sequence identifier: P08559_C181
  MOD_RES (24)..(24): May or may not be conjugated to a chemical probe
KNFYGGNGIVGAQVPLGAGIALACKY

SEQ ID NO: 1995 - protein, 21 aa, Homo sapiens
  Table 3 sequence identifier: P42126_C173
  MOD_RES (3)..(3): May or may not be conjugated to a chemical probe
RYCIGLNETQLGIIAPFWLKD

SEQ ID NO: 1996 - protein, 10 aa, Homo sapiens
  Table 3 sequence identifier: P84103_C6
  MOD_RES (4)..(4): May or may not be conjugated to a chemical probe
RDSCPLDCKV

SEQ ID NO: 1997 - protein, 23 aa, Homo sapiens
  Table 3 sequence identifier: Q14566_C540
  MOD_RES (12)..(12): May or may not be conjugated to a chemical probe
RFDLFFILVDECNEVTDYAIARR

SEQ ID NO: 1998 - protein, 9 aa, Homo sapiens
  Table 3 sequence identifier: P21980_C290
  MOD_RES (2)..(2): May or may not be conjugated to a chemical probe
RCLGIPTRV

SEQ ID NO: 1999 - protein, 13 aa, Homo sapiens
  Table 3 sequence identifier: O75391_C191
  MOD_RES (5)..(5): May or may not be conjugated to a chemical probe
KTYGCVPVANKRD

SEQ ID NO: 2000 - protein, 15 aa, Homo sapiens
  Table 3 sequence identifier: P31943_C22
  MOD_RES (7)..(7): May or may not be conjugated to a chemical probe
RGLPWSCSADEVQRF

SEQ ID NO: 2001 - protein, 21 aa, Homo sapiens
  Table 3 sequence identifier: P31943_C290
  MOD_RES (16)..(16): May or may not be conjugated to a chemical probe
RYGDGGSTFQSTTGHCVHMRG

SEQ ID NO: 2002 - protein, 25 aa, Homo sapiens
  Table 3 sequence identifier: O95347_C132
  MOD_RES (7)..(7): May or may not be conjugated to a chemical probe
RVQDLFCSVGLNVNNPHFLIMQGRI

SEQ ID NO: 2003 - protein, 41 aa, Homo sapiens
  Table 3 sequence identifier: O95983_C172
  MOD_RES (10)..(10): May or may not be conjugated to a chemical probe
KGLQGVGPGCTDETLLSAIASALHTSTMPITGQLSAAVEKN

SEQ ID NO: 2004 - protein, 19 aa, Homo sapiens
  Table 3 sequence identifier: P49321_C788
  MOD_RES (19)..(19): May or may not be conjugated to a chemical probe
RAAVEGTVEAGATVESTAC

SEQ ID NO: 2005 - protein, 23 aa, Homo sapiens
  Table 3 sequence identifier: P13489_C96
  MOD_RES (8)..(8): May or may not be conjugated to a chemical probe
KLSLQNCCLTGAGCGVLSSTLRT

SEQ ID NO: 2006 - protein, 11 aa, Homo sapiens
  Table 3 sequence identifier: Q86V48_C969
  MOD_RES (3)..(3): May or may not be conjugated to a chemical probe
RSCLFEQGTRR

SEQ ID NO: 2007 - protein, 25 aa, Homo sapiens
  Table 3 sequence identifier: Q14240_C135
  MOD_RES (17)..(17): May or may not be conjugated to a chemical probe
KVILALGDYMGATCHACIGGTNVRN

SEQ ID NO: 2008 - protein, 31 aa, Homo sapiens; identical to SEQ ID NO: 885
  Table 3 sequence identifier: P22307_C71
  MOD_RES (27)..(27): May or may not be conjugated to a chemical probe

SEQ ID NO: 2009 - protein, 16 aa, Homo sapiens
  Table 3 sequence identifier: Q9Y3B4_C83
  MOD_RES (13)..(13): May or may not be conjugated to a chemical probe
KNACDHLSGFNVCNRY

SEQ ID NO: 2010 - protein, 33 aa, Homo sapiens
  Table 3 sequence identifier: Q8WUM4_C512
  MOD_RES (27)..(27): May or may not be conjugated to a chemical probe
KPLRAEGTNFRTVLDKAVQADGQVKECYQSHRD

SEQ ID NO: 2011 - protein, 13 aa, Homo sapiens
  Table 3 sequence identifier: Q8IXH7_C293
  MOD_RES (3)..(3): May or may not be conjugated to a chemical probe
RACQALGAMLSKG

SEQ ID NO: 2012 - protein, 34 aa, Homo sapiens
  Table 3 sequence identifier: Q15003_C296
  MOD_RES (26)..(26): May or may not be conjugated to a chemical probe
RSELLFPSDVQTLSTGEPLELPELGCVEMTDLKA

SEQ ID NO: 2013 - protein, 18 aa, Homo sapiens
  Table 3 sequence identifier: Q9C0B1_C171
  MOD_RES (10)..(10): May or may not be conjugated to a chemical probe
KANEDAVPLCMSADFPRV

SEQ ID NO: 2014 - protein, 26 aa, Homo sapiens
  Table 3 sequence identifier: Q8WXI9_C308
  MOD_RES (23)..(23): May or may not be conjugated to a chemical probe
RTTTPNMNPAINYQPQSSSSVPCQRT

SEQ ID NO: 2015 - protein, 14 aa, Homo sapiens
  Table 3 sequence identifier: P07814_C856
  MOD_RES (8)..(8): May or may not be conjugated to a chemical probe
KINEAVECLLSLKA

SEQ ID NO: 2016 - protein, 25 aa, Homo sapiens
  Table 3 sequence identifier: P22102_C134
  MOD_RES (10)..(10): May or may not be conjugated to a chemical probe
KAFTKPEEACSFILSADFPALVVKA

SEQ ID NO: 2017 - protein, 18 aa, Homo sapiens
  Table 3 sequence identifier: Q13425_C374
  MOD_RES (8)..(8): May or may not be conjugated to a chemical probe
RDAWASPCHSYPLVATRL

SEQ ID NO: 2018 - protein, 19 aa, Homo sapiens
  Table 3 sequence identifier: Q04760_C139
  MOD_RES (17)..(17): May or may not be conjugated to a chemical probe
RGFGHIGIAVPDVYSACKR

SEQ ID NO: 2019 - protein, 18 aa, Homo sapiens
  Table 3 sequence identifier: P25789_C163
  MOD_RES (4)..(4): May or may not be conjugated to a chemical probe
KATCIGNNSAAAVSMLKQ

SEQ ID NO: 2020 - protein, 26 aa, Homo sapiens
  Table 3 sequence identifier: P07355_C262
  MOD_RES (14)..(14): May or may not be conjugated to a chemical probe
KGDLENAFLNLVQCIQNKPLYFADRL

SEQ ID NO: 2021 - protein, 18 aa, Homo sapiens
  Table 3 sequence identifier: P53597_C172
  MOD_RES (7)..(7): May or may not be conjugated to a chemical probe
RLIGPNCPGVINPGECKI

SEQ ID NO: 2022 - protein, 20 aa, Homo sapiens
  Table 3 sequence identifier: P26368_C429
  MOD_RES (17)..(17): May or may not be conjugated to a chemical probe
KSIEIPRPVDGVEVPGCGKI

SEQ ID NO: 2023 - protein, 10 aa, Homo sapiens
  Table 3 sequence identifier: Q05086_C83
  MOD_RES (3)..(3): May or may not be conjugated to a chemical probe
KLCDPHPSKK

SEQ ID NO: 2024 - protein, 11 aa, Homo sapiens
  Table 3 sequence identifier: O00170_C208
  MOD_RES (8)..(8): May or may not be conjugated to a chemical probe
KYYDAIACLKN

SEQ ID NO: 2025 - protein, 22 aa, Homo sapiens
  Table 3 sequence identifier: P31323_C116
  MOD_RES (5)..(5): May or may not be conjugated to a chemical probe
RASVCAEAYNPDEEEDDAESRI

SEQ ID NO: 2026 - protein, 11 aa, Homo sapiens
  Table 3 sequence identifier: Q8WW33_C51
  MOD_RES (5)..(5): May or may not be conjugated to a chemical probe
KLATCPFNARH

SEQ ID NO: 2027 - protein, 27 aa, Homo sapiens
  Table 3 sequence identifier: Q9Y5Y2_C196
  MOD_RES (14)..(14): May or may not be conjugated to a chemical probe
RVMGIVENMSGFTCPHCTECTSVFSRG

SEQ ID NO: 2028 - protein, 13 aa, Homo sapiens
  Table 3 sequence identifier: O95456_C169
  MOD_RES (11)..(11): May or may not be conjugated to a chemical probe
RKNMQITILTCRH

SEQ ID NO: 2029 - protein, 14 aa, Homo sapiens
  Table 3 sequence identifier: P13796_C618
  MOD_RES (9)..(9): May or may not be conjugated to a chemical probe
KMVMTVFACLMGKG

SEQ ID NO: 2030 - protein, 21 aa, Homo sapiens
  Table 3 sequence identifier: P23921_C779
  MOD_RES (8)..(8): May or may not be conjugated to a chemical probe
RNTAAMVCSLENRDECLMCGS

SEQ ID NO: 2031 - protein, 12 aa, Homo sapiens
  Table 3 sequence identifier: P31689_C149
  MOD_RES (6)..(6): May or may not be conjugated to a chemical probe
KGAVECCPNCRG

SEQ ID NO: 2032 - protein, 24 aa, Homo sapiens
  Table 3 sequence identifier: Q9Y490_C1045
  MOD_RES (6)..(6): May or may not be conjugated to a chemical probe
KAQEACGPLEMDSALSVVQNLEKD

SEQ ID NO: 2033 - protein, 23 aa, Homo sapiens
  Table 3 sequence identifier: Q9UGI8_C196
  MOD_RES (14)..(14): May or may not be conjugated to a chemical probe
KSEALGVGDVKLPCEMDAQGPKQ

SEQ ID NO: 2034 - protein, 17 aa, Homo sapiens
  Table 3 sequence identifier: P54136_C369
  MOD_RES (8)..(8): May or may not be conjugated to a chemical probe
KIVFVPGCSIPLTIVKS

SEQ ID NO: 2035 - protein, 11 aa, Homo sapiens
  Table 3 sequence identifier: P47756_C62
  MOD_RES (6)..(6): May or may not be conjugated to a chemical probe
KDYLLCDYNRD

SEQ ID NO: 2036 - protein, 16 aa, Homo sapiens
  Table 3 sequence identifier: P47897_C657
  MOD_RES (6)..(6): May or may not be conjugated to a chemical probe
KGPSGCVESLEVTCRR

SEQ ID NO: 2037 - protein, 21 aa, Homo sapiens
  Table 3 sequence identifier: P56192_C12
  MOD_RES (11)..(11): May or may not be conjugated to a chemical probe
RLFVSDGVPGCLPVLAAAGRA

SEQ ID NO: 2038 - protein, 15 aa, Homo sapiens
  Table 3 sequence identifier: Q9Y570_C312
  MOD_RES (10)..(10): May or may not be conjugated to a chemical probe
RGLSNLFLSCPIPKL

SEQ ID NO: 2039 - protein, 18 aa, Homo sapiens
  Table 3 sequence identifier: Q7L4I2_C382
  MOD_RES (8)..(8): May or may not be conjugated to a chemical probe
KSEDEAGCSSVDEESYKT

SEQ ID NO: 2040 - protein, 25 aa, Homo sapiens
  Table 3 sequence identifier: Q13496_C53
  MOD_RES (17)..(17): May or may not be conjugated to a chemical probe
RLPGETLITDKEVIYICPFNGPIKG

SEQ ID NO: 2041 - protein, 13 aa, Homo sapiens
  Table 3 sequence identifier: O15460_C510
  MOD_RES (11)..(11): May or may not be conjugated to a chemical probe
RHAACPVLVGCKW

SEQ ID NO: 2042 - protein, 11 aa, Homo sapiens
  Table 3 sequence identifier: P00558_C99
  MOD_RES (3)..(3): May or may not be conjugated to a chemical probe
KDCVGPEVEKA

SEQ ID NO: 2043 - protein, 25 aa, Homo sapiens
  Table 3 sequence identifier: P05412_C99
  MOD_RES (22)..(22): May or may not be conjugated to a chemical probe
RLIIQSSNGHITTTPTPTQFLCPKN

SEQ ID NO: 2044 - protein, 20 aa, Homo sapiens
  Table 3 sequence identifier: Q9H3R5_C35
  MOD_RES (15)..(15): May or may not be conjugated to a chemical probe
RAGGPPQVAGAQAACSEDRM

SEQ ID NO: 2045 - protein, 8 aa, Homo sapiens
  Table 3 sequence identifier: Q02543_C16
  MOD_RES (2)..(2): May or may not be conjugated to a chemical probe
RCLPTPKC

SEQ ID NO: 2046 - protein, 13 aa, Homo sapiens
  Table 3 sequence identifier: Q06587_C69
  MOD_RES (3)..(3): May or may not be conjugated to a chemical probe
RFCSDCIVTALRS

SEQ ID NO: 2047 - protein, 19 aa, Homo sapiens
  Table 3 sequence identifier: Q15365_C163
  MOD_RES (4)..(4): May or may not be conjugated to a chemical probe
KQICLVMLETLSQSPQGRV

SEQ ID NO: 2048 - protein, 18 aa, Homo sapiens
  Table 3 sequence identifier: O75369_C660
  MOD_RES (4)..(4): May or may not be conjugated to a chemical probe
KSGCIVNNLAEFTVDPKD

SEQ ID NO: 2049 - protein, 11 aa, Homo sapiens
  Table 3 sequence identifier: O75369_C2537
  MOD_RES (8)..(8): May or may not be conjugated to a chemical probe
KSSFLVDCSKA

SEQ ID NO: 2050 - protein, 12 aa, Homo sapiens
  Table 3 sequence identifier: Q5RKV6_C117
  MOD_RES (8)..(8): May or may not be conjugated to a chemical probe
RRAPPGGCEERE

SEQ ID NO: 2051 - protein, 14 aa, Homo sapiens
  Table 3 sequence identifier: O15067_C606
  MOD_RES (10)..(10): May or may not be conjugated to a chemical probe
RIVLVDDRECPVRR

SEQ ID NO: 2052 - protein, 13 aa, Homo sapiens
  Table 3 sequence identifier: Q9HB19_C191
  MOD_RES (11)..(11): May or may not be conjugated to a chemical probe
RSQSYIPTSGCRA

SEQ ID NO: 2053 - protein, 19 aa, Homo sapiens
  Table 3 sequence identifier: Q8WVV9_C84
  MOD_RES (4)..(4): May or may not be conjugated to a chemical probe
RGLCESVVEADLVEALEKF

SEQ ID NO: 2054 - protein, 40 aa, Homo sapiens
  Table 3 sequence identifier: O95400_C234
  MOD_RES (5)..(5): May or may not be conjugated to a chemical probe
KGLGCQTLGPHNPTPPPSLDMFAEELAEEELETPTPTQRG

SEQ ID NO: 2055 - protein, 17 aa, Homo sapiens
  Table 3 sequence identifier: O94804_C947
  MOD_RES (8)..(8): May or may not be conjugated to a chemical probe
KLSEEAECPNPSTPSKA

SEQ ID NO: 2056 - protein, 27 aa, Homo sapiens
  Table 3 sequence identifier: Q5TBB1_C56
  MOD_RES (18)..(18): May or may not be conjugated to a chemical probe
KLVNPCSGEGAIYLFNMCLQQLFEVKV

SEQ ID NO: 2057 - protein, 29 aa, Homo sapiens
  Table 3 sequence identifier: Q96GW9_C425
  MOD_RES (12)..(12): May or may not be conjugated to a chemical probe
RINPSETYPAFCTTCFPSEPGLVGPSVRA

SEQ ID NO: 2058 - protein, 31 aa, Homo sapiens
  Table 3 sequence identifier: P82912_C112
  MOD_RES (24)..(24): May or may not be conjugated to a chemical probe
KASHNNTQIQVVSASNEPLAFASCGTEGFRN

SEQ ID NO: 2059 - protein, 29 aa, Homo sapiens
  Table 3 sequence identifier: Q16643_C613
  MOD_RES (26)..(26): May or may not be conjugated to a chemical probe
KEGTQASEGYFSQSQEEEFAQSEELCAKA

SEQ ID NO: 2060 - protein, 15 aa, Homo sapiens
  Table 3 sequence identifier: Q9UPQ0_C577
  MOD_RES (3)..(3): May or may not be conjugated to a chemical probe
RECPTVAPAHSLTKS

SEQ ID NO: 2061 - protein, 14 aa, Homo sapiens
  Table 3 sequence identifier: P21333_C1453
  MOD_RES (2)..(2): May or may not be conjugated to a chemical probe
KCSGPGLSPGMVRA

SEQ ID NO: 2062 - protein, 24 aa, Homo sapiens
  Table 3 sequence identifier: Q9UGV2_C166
  MOD_RES (21)..(21): May or may not be conjugated to a chemical probe
RFALNHPELVEGLVLINVDPCAKG

SEQ ID NO: 2063 - protein, 15 aa, Homo sapiens
  Table 3 sequence identifier: P40926_C89
  MOD_RES (12)..(12): May or may not be conjugated to a chemical probe
KGYLGPEQLPDCLKG

SEQ ID NO: 2064 - protein, 15 aa, Homo sapiens
  Table 3 sequence identifier: P40926_C93
  MOD_RES (3)..(3): May or may not be conjugated to a chemical probe
KGCDVVVIPAGVPRK

SEQ ID NO: 2065 - protein, 24 aa, Homo sapiens
  Table 3 sequence identifier: Q14839_C1594
  MOD_RES (11)..(11): May or may not be conjugated to a chemical probe
KSTAPETAIECTQAPAPASEDEKV

SEQ ID NO: 2066 - protein, 39 aa, Homo sapiens
  Table 3 sequence identifier: O95273_C300
  MOD_RES (33)..(33): May or may not be conjugated to a chemical probe
KDQVAQLDDIVDISDEISPSVDDLALSIYPPMCHLTVRI

SEQ ID NO: 2067 - protein, 13 aa, Homo sapiens
  Table 3 sequence identifier: A6NE09_C163
  MOD_RES (9)..(9): May or may not be conjugated to a chemical probe
RYVDIAIPCNNKG

SEQ ID NO: 2068 - protein, 19 aa, Homo sapiens
  Table 3 sequence identifier: P62942_C23
  MOD_RES (6)..(6): May or may not be conjugated to a chemical probe
KRGQTCVVHYTGMLEDGKK

SEQ ID NO: 2069 - protein, 11 aa, Homo sapiens
  Table 3 sequence identifier: Q04446_C221
  MOD_RES (5)..(5): May or may not be conjugated to a chemical probe
KHFTCNVLPRI

SEQ ID NO: 2070 - protein, 27 aa, Homo sapiens
  Table 3 sequence identifier: P16219_C289
  MOD_RES (18)..(18): May or may not be conjugated to a chemical probe
RIGIASQALGIAQTALDCAVNYAENRM

SEQ ID NO: 2071 - protein, 12 aa, Homo sapiens
  Table 3 sequence identifier: Q9Y3C6_C133
  MOD_RES (3)..(3): May or may not be conjugated to a chemical probe
RVCQGIGMVNRV

SEQ ID NO: 2072 - protein, 29 aa, Homo sapiens
  Table 3 sequence identifier: P61970_C80
  MOD_RES (18)..(18): May or may not be conjugated to a chemical probe
KIQHSITAQDHQPTPDSCIISMVVGQLKA

SEQ ID NO: 2073 - protein, 25 aa, Homo sapiens
  Table 3 sequence identifier: O14776_C535
  MOD_RES (16)..(16): May or may not be conjugated to a chemical probe
KAKPVATAPIPGTPWCVVWTGDERV

SEQ ID NO: 2074 - protein, 32 aa, Homo sapiens
  Table 3 sequence identifier: Q9BRP1_C278
  MOD_RES (13)..(13): May or may not be conjugated to a chemical probe
RYSWSGEPLFLTCPTSEVTELPACSQCGGQRI

SEQ ID NO: 2075 - protein, 14 aa, Homo sapiens
  Table 3 sequence identifier: P13639_C567
  MOD_RES (9)..(9): May or may not be conjugated to a chemical probe
KDLEEDHACIPIKK

SEQ ID NO: 2076 - protein, 45 aa, Homo sapiens
  Table 3 sequence identifier: Q8WUX2_C113
  MOD_RES (17)..(17): May or may not be conjugated to a chemical probe
KDPTTKPFSVLLYIGTCDNPDYLGPAPLEDIAEQIFNAAGPSGRN

SEQ ID NO: 2077 - protein, 23 aa, Homo sapiens
  Table 3 sequence identifier: Q9H8W4_C219
  MOD_RES (18)..(18): May or may not be conjugated to a chemical probe
RICDFCYDLLSAGDMATCQPARS

SEQ ID NO: 2078 - protein, 9 aa, Homo sapiens
  Table 3 sequence identifier: Q15021_C286
  MOD_RES (2)..(2): May or may not be conjugated to a chemical probe
KCPQELSRD

SEQ ID NO: 2079 - protein, 32 aa, Homo sapiens
  Table 3 sequence identifier: O95394_C93
  MOD_RES (20)..(20): May or may not be conjugated to a chemical probe
KLVDPLGEMLAPSWEEHATCLANAEEQDMQRV

SEQ ID NO: 2080 - protein, 11 aa, Homo sapiens
  Table 3 sequence identifier: Q9NP61_C312
  MOD_RES (9)..(9): May or may not be conjugated to a chemical probe
RLGMGFGNCRS

SEQ ID NO: 2081 - protein, 13 aa, Homo sapiens
  Table 3 sequence identifier: Q86TG7_C119
  MOD_RES (3)..(3): May or may not be conjugated to a chemical probe
RVCFVTSMMTGRA

SEQ ID NO: 2082 - protein, 26 aa, Homo sapiens
  Table 3 sequence identifier: Q7L0Y3_C78
  MOD_RES (8)..(8): May or may not be conjugated to a chemical probe
KSSVQEECVSTISSSKDEDPLAATRE

SEQ ID NO: 2083 - protein, 11 aa, Homo sapiens
  Table 3 sequence identifier: P35579_C694
  MOD_RES (2)..(2): May or may not be conjugated to a chemical probe
RCNGVLEGIRI

SEQ ID NO: 2084 - protein, 10 aa, Homo sapiens
  Table 3 sequence identifier: Q7Z7A4_C570
  MOD_RES (3)..(3): May or may not be conjugated to a chemical probe
KTCDHSAPKI

SEQ ID NO: 2085 - protein, 13 aa, Homo sapiens
  Table 3 sequence identifier: P05091_C386
  MOD_RES (4)..(4): May or may not be conjugated to a chemical probe
KLLCGGGIAADRG

SEQ ID NO: 2086 - protein, 14 aa, Homo sapiens
  Table 3 sequence identifier: O15231_C615
  MOD_RES (5)..(5): May or may not be conjugated to a chemical probe
KKPPCGSTPYSERT

SEQ ID NO: 2087 - protein, 18 aa, Homo sapiens
  Table 3 sequence identifier: Q9P2J5_C573
  MOD_RES (15)..(15): May or may not be conjugated to a chemical probe
RNFEATLGWLQEHACSRT

SEQ ID NO: 2088 - protein, 26 aa, Homo sapiens
  Table 3 sequence identifier: P41250_C525
  MOD_RES (13)..(13): May or may not be conjugated to a chemical probe
KLVMEYLAICDECYITEMEMLLNEKG

SEQ ID NO: 2089 - protein, 12 aa, Homo sapiens
  Table 3 sequence identifier: Q9NR33_C84
  MOD_RES (5)..(5): May or may not be conjugated to a chemical probe
KDAYCCAQQGKR

SEQ ID NO: 2090 - protein, 23 aa, Homo sapiens
  Table 3 sequence identifier: Q9NQW6_C210
  MOD_RES (10)..(10): May or may not be conjugated to a chemical probe
RLANLAATICSWEDDVNHSFAKQ

SEQ ID NO: 2091 - protein, 15 aa, Homo sapiens
  Table 3 sequence identifier: Q9NQW6_C1117
  MOD_RES (8)..(8): May or may not be conjugated to a chemical probe
RLWQPDACYKPIGKP

SEQ ID NO: 2092 - protein, 22 aa, Homo sapiens
  Table 3 sequence identifier: Q9HCC0_C267
  MOD_RES (20)..(20): May or may not be conjugated to a chemical probe
KAATGEEVSAEDLGGADLHCRK

SEQ ID NO: 2093 - protein, 16 aa, Homo sapiens
  Table 3 sequence identifier: P55884_C420
  MOD_RES (5)..(5): May or may not be conjugated to a chemical probe
RGFHCESSAHWPIFKW

SEQ ID NO: 2094 - protein, 18 aa, Homo sapiens
  Table 3 sequence identifier: P20290_C22
  MOD_RES (4)..(4): May or may not be conjugated to a chemical probe
RGGCPGGEATLSQPPPRG

SEQ ID NO: 2095 - protein, 12 aa, Homo sapiens
  Table 3 sequence identifier: P49368_C398
  MOD_RES (10)..(10): May or may not be conjugated to a chemical probe
RNLQDAMQVCRN

SEQ ID NO: 2096 - protein, 12 aa, Homo sapiens
  Table 3 sequence identifier: O75600_C106
  MOD_RES (4)..(4): May or may not be conjugated to a chemical probe
RFICGTQSIHKN

SEQ ID NO: 2097 - protein, 29 aa, Homo sapiens
  Table 3 sequence identifier: Q6PKG0_C864
  MOD_RES (21)..(21): May or may not be conjugated to a chemical probe
RTASISSSPSEGTPTVGSYGCTPQSLPKF

SEQ ID NO: 2098 - protein, 25 aa, Homo sapiens
  Table 3 sequence identifier: Q5H9R7_C467
  MOD_RES (5)..(5): May or may not be conjugated to a chemical probe
RIANCIVHSTDKGPNSALVQQLIKD

SEQ ID NO: 2099 - protein, 34 aa, Homo sapiens
  Table 3 sequence identifier: Q9H4A4_C311
  MOD_RES (27)..(27): May or may not be conjugated to a chemical probe
RYDLLFMPPSFPFGGMENPCLTFVTPCLLAGDRS

SEQ ID NO: 2100 - protein, 20 aa, Homo sapiens
  Table 3 sequence identifier: Q9BUF5_C12
  MOD_RES (12)..(12): May or may not be conjugated to a chemical probe
MREIVHIQAGQCGNQIGTKF

SEQ ID NO: 2101 - protein, 17 aa, Homo sapiens
  Table 3 sequence identifier: P52272_C676
  MOD_RES (7)..(7): May or may not be conjugated to a chemical probe
KDKFNECGHVLYADIKM

SEQ ID NO: 2102 - protein, 11 aa, Homo sapiens
  Table 3 sequence identifier: Q8TB03_C300
  MOD_RES (6)..(6): May or may not be conjugated to a chemical probe
KLDSLCLHQKL

SEQ ID NO: 2103 - protein, 23 aa, Homo sapiens
  Table 3 sequence identifier: Q9H7D7_C656
  MOD_RES (18)..(18): May or may not be conjugated to a chemical probe
RIWGPAPFIDHQNIEEECSSMDS

SEQ ID NO: 2104 - protein, 21 aa, Homo sapiens
  Table 3 sequence identifier: P50395_C317
  MOD_RES (9)..(9): May or may not be conjugated to a chemical probe
KNTNDANSCQIIIPQNQVNRK

SEQ ID NO: 2105 - protein, 11 aa, Homo sapiens
  Table 3 sequence identifier: P25205_C263
  MOD_RES (7)..(7): May or may not be conjugated to a chemical probe
RTVLIACNVKQ

SEQ ID NO: 2106 - protein, 12 aa, Homo sapiens
  Table 3 sequence identifier: Q8TD19_C878
  MOD_RES (8)..(8): May or may not be conjugated to a chemical probe
RLNPAVTCAGKG

SEQ ID NO: 2107 - protein, 24 aa, Homo sapiens
  Table 3 sequence identifier: P31947_C96
  MOD_RES (10)..(10): May or may not be conjugated to a chemical probe
KVETELQGVCDTVLGLLDSHLIKE

SEQ ID NO: 2108 - protein, 36 aa, Homo sapiens
  Table 3 sequence identifier: P49321_C568
  MOD_RES (22)..(22): May or may not be conjugated to a chemical probe
KLGEVSVESENYVQAVEEFQSCLNLQEQYLEAHDRL

SEQ ID NO: 2109 - protein, 16 aa, Homo sapiens
  Table 3 sequence identifier: Q7L2J0_C54
  MOD_RES (2)..(2): May or may not be conjugated to a chemical probe
RCAPSAGSPAAAVGRE

SEQ ID NO: 2110 - protein, 8 aa, Homo sapiens
  Table 3 sequence identifier: Q96BN8_C347
  MOD_RES (3)..(3): May or may not be conjugated to a chemical probe
RVCEETSL

SEQ ID NO: 2111 - protein, 23 aa, Homo sapiens
  Table 3 sequence identifier: Q12888_C1159
  MOD_RES (19)..(19): May or may not be conjugated to a chemical probe
KALIERPSQNNIGIQTMECSLRV

SEQ ID NO: 2112 - protein, 12 aa, Homo sapiens
  Table 3 sequence identifier: P29034_C22
  MOD_RES (4)..(4): May or may not be conjugated to a chemical probe
KYSCQEGDKFKL

SEQ ID NO: 2113 - protein, 8 aa, Homo sapiens
  Table 3 sequence identifier: P61978_C205
  MOD_RES (5)..(5): May or may not be conjugated to a chemical probe
RVVECIKI

SEQ ID NO: 2114 - protein, 14 aa, Homo sapiens
  Table 3 sequence identifier: P78527_C3837
  MOD_RES (5)..(5): May or may not be conjugated to a chemical probe
RAPPCEYKDWLTKM

SEQ ID NO: 2115 - protein, 25 aa, Homo sapiens
  Table 3 sequence identifier: Q7LG56_C279
  MOD_RES (20)..(20): May or may not be conjugated to a chemical probe
KIEQEFLTEALPVGLIGMNCILMKQ

SEQ ID NO: 2116 - protein, 13 aa, Homo sapiens
  Table 3 sequence identifier: P12814_C180
  MOD_RES (7)..(7): May or may not be conjugated to a chemical probe
KDGLGFCALIHRH

SEQ ID NO: 2117 - protein, 13 aa, Homo sapiens
  Table 3 sequence identifier: Q9ULV4_C343
  MOD_RES (3)..(3): May or may not be conjugated to a chemical probe
RKCEPIIMTVPRK

SEQ ID NO: 2118 - protein, 15 aa, Homo sapiens
  Table 3 sequence identifier: P22234_C185
  MOD_RES (8)..(8): May or may not be conjugated to a chemical probe
KSWLPQNCTLVDMKI

SEQ ID NO: 2119 - protein, 14 aa, Homo sapiens
  Table 3 sequence identifier: P22234_C288
  MOD_RES (3)..(3): May or may not be conjugated to a chemical probe
KACGNFGIPCELRV

SEQ ID NO: 2120 - protein, 9 aa, Homo sapiens
  Table 3 sequence identifier: P30837_C386
  MOD_RES (4)..(4): May or may not be conjugated to a chemical probe
KLLCGGERF

SEQ ID NO: 2121 - protein, 13 aa, Homo sapiens
  Table 3 sequence identifier: P25098_C120
  MOD_RES (6)..(6): May or may not be conjugated to a chemical probe
KELLACSHPFSKS

SEQ ID NO: 2122 - protein, 27 aa, Homo sapiens
  Table 3 sequence identifier: P35998_C180
  MOD_RES (25)..(25): May or may not be conjugated to a chemical probe
KIDPTVTMMQVEEKPDVTYSDVGGCKE

SEQ ID NO: 2123 - protein, 22 aa, Homo sapiens
  Table 3 sequence identifier: P08243_C255
  MOD_RES (4)..(4): May or may not be conjugated to a chemical probe
RIGCLLSGGLDSSLVAATLLKQ

SEQ ID NO: 2124 - protein, 30 aa, Homo sapiens
  Table 3 sequence identifier: O95819_C202
  MOD_RES (18)..(18): May or may not be conjugated to a chemical probe
RNTFIGTPYWMAPEVIACDENPDATYDYRS

SEQ ID NO: 2125 - protein, 9 aa, Homo sapiens
  Table 3 sequence identifier: Q13557_C273
  MOD_RES (6)..(6): May or may not be conjugated to a chemical probe
KHPWICQRS

SEQ ID NO: 2126 - protein, 20 aa, Homo sapiens
  Table 3 sequence identifier: P50213_C127
  MOD_RES (12)..(12): May or may not be conjugated to a chemical probe
KTFDLYANVRPCVSIEGYKT

SEQ ID NO: 2127 - protein, 13 aa, Homo sapiens
  Table 3 sequence identifier: O95336_C237
  MOD_RES (3)..(3): May or may not be conjugated to a chemical probe
KLCWFLDEAAARL

SEQ ID NO: 2128 - protein, 9 aa, Homo sapiens
  Table 3 sequence identifier: Q13155_C143
  MOD_RES (4)..(4): May or may not be conjugated to a chemical probe
RLLCEHFRV

SEQ ID NO: 2129 - protein, 10 aa, Homo sapiens
  Table 3 sequence identifier: Q14204_C3940
  MOD_RES (4)..(4): May or may not be conjugated to a chemical probe
RLSCLPAFKD

SEQ ID NO: 2130 - protein, 24 aa, Homo sapiens
  Table 3 sequence identifier: P30154_C306
  MOD_RES (18)..(18): May or may not be conjugated to a chemical probe
KITLNDLIPAFQNLLKDCEAEVRA

SEQ ID NO: 2131 - protein, 12 aa, Homo sapiens
  Table 3 sequence identifier: P61758_C113
  MOD_RES (10)..(10): May or may not be conjugated to a chemical probe
RFLLADNLYCKA

SEQ ID NO: 2132 - protein, 25 aa, Homo sapiens
  Table 3 sequence identifier: P48739_C13
  MOD_RES (6)..(6): May or may not be conjugated to a chemical probe
RVVLPCSVQEYQVGQLYSVAEASKN

SEQ ID NO: 2133 - protein, 14 aa, Homo sapiens
  Table 3 sequence identifier: P08134_C159
  MOD_RES (10)..(10): May or may not be conjugated to a chemical probe
RISAFGYLECSAKT

SEQ ID NO: 2134 - protein, 10 aa, Homo sapiens
  Table 3 sequence identifier: P15121_C81
  MOD_RES (4)..(4): May or may not be conjugated to a chemical probe
KLWCTYHEKG

SEQ ID NO: 2135 - protein, 28 aa, Homo sapiens
  Table 3 sequence identifier: P86790_C358
  MOD_RES (19)..(19): May or may not be conjugated to a chemical probe
RRLDSIVGPQLTVLASDICEQFNINKRM

SEQ ID NO: 2136 - protein, 9 aa, Homo sapiens
  Table 3 sequence identifier: P42704_C863
  MOD_RES (7)..(7): May or may not be conjugated to a chemical probe
RIHDVLCKL

SEQ ID NO: 2137 - protein, 16 aa, Homo sapiens
  Table 3 sequence identifier: P33316_C166
  MOD_RES (12)..(12): May or may not be conjugated to a chemical probe
KTDIQIALPSGCYGRV

SEQ ID NO: 2138 - protein, 17 aa, Homo sapiens
  Table 3 sequence identifier: Q92597_C289
  MOD_RES (5)..(5): May or may not be conjugated to a chemical probe
KMADCGGLPQISQPAKL

SEQ ID NO: 2139 - protein, 17 aa, Homo sapiens
  Table 3 sequence identifier: P35236_C62
  MOD_RES (10)..(10): May or may not be conjugated to a chemical probe
RSLGAVEPICSVNTPRE

SEQ ID NO: 2140 - protein, 23 aa, Homo sapiens
  Table 3 sequence identifier: P17987_C296
  MOD_RES (20)..(20): May or may not be conjugated to a chemical probe
KILATGANVILTTGGIDDMCLKY

SEQ ID NO: 2141 - protein, 14 aa, Homo sapiens
  Table 3 sequence identifier: Q6PI48_C590
  MOD_RES (4)..(4): May or may not be conjugated to a chemical probe
RLICLVTGSPSIRD

SEQ ID NO: 2142 - protein, 14 aa, Homo sapiens
  Table 3 sequence identifier: P63244_C249
  MOD_RES (5)..(5): May or may not be conjugated to a chemical probe
RYWLCAATGPSIKI

SEQ ID NO: 2143 - protein, 27 aa, Homo sapiens
  Table 3 sequence identifier: Q12874_C437
  MOD_RES (2)..(2): May or may not be conjugated to a chemical probe
RCLGIPNTAHFANVTQIEDAVSLWAKL

SEQ ID NO: 2144 - protein, 18 aa, Homo sapiens
  Table 3 sequence identifier: Q9Y6W5_C27
  MOD_RES (6)..(6): May or may not be conjugated to a chemical probe
RSELECVTNITLANVIRQ

SEQ ID NO: 2145 - protein, 47 aa, Homo sapiens
  Table 3 sequence identifier: P04075_C290
  MOD_RES (32)..(32): May or may not be conjugated to a chemical probe
RTVPPAVTGITFLSGGQSEEEASINLNAINKCPLLKPWALTFSYGRA

SEQ ID NO: 2146 - protein, 14 aa, Homo sapiens
  Table 3 sequence identifier: Q8WW33_C76
  MOD_RES (3)..(3): May or may not be conjugated to a chemical probe
RSCIEQDVVNQTRS

SEQ ID NO: 2147 - protein, 19 aa, Homo sapiens
  Table 3 sequence identifier: P57081_C137
  MOD_RES (16)..(16): May or may not be conjugated to a chemical probe
KSGDVYSFSVLEPHGCGRL

SEQ ID NO: 2148 - protein, 17 aa, Homo sapiens
  Table 3 sequence identifier: O60343_C1277
  MOD_RES (11)..(11): May or may not be conjugated to a chemical probe
KLLPADALVNCDLLLRD

SEQ ID NO: 2149 - protein, 16 aa, Homo sapiens
  Table 3 sequence identifier: P30084_C111
  MOD_RES (11)..(11): May or may not be conjugated to a chemical probe
KEMQNLSFQDCYSSKF

SEQ ID NO: 2150 - protein, 22 aa, Homo sapiens
  Table 3 sequence identifier: P12268_C173
  MOD_RES (13)..(13): May or may not be conjugated to a chemical probe
RDIDFLKEEEHDCFLEEIMTKR

SEQ ID NO: 2151 - protein, 14 aa, Homo sapiens
  Table 3 sequence identifier: O43290_C674
  MOD_RES (9)..(9): May or may not be conjugated to a chemical probe
KSLPSAVYCIEDKM

SEQ ID NO: 2152 - protein, 23 aa, Homo sapiens
  Table 3 sequence identifier: Q9P258_C280
  MOD_RES (9)..(9): May or may not be conjugated to a chemical probe
KGNLYSFGCPEYGQLGHNSDGKF

SEQ ID NO: 2153 - protein, 13 aa, Homo sapiens
  Table 3 sequence identifier: P15153_C6
  MOD_RES (2)..(2): May or may not be conjugated to a chemical probe
KCVVVGDGAVGKT

SEQ ID NO: 2154 - protein, 11 aa, Homo sapiens
  Table 3 sequence identifier: O60361_C94
  MOD_RES (5)..(5): May or may not be conjugated to a chemical probe
RGDFCIQVGRN

SEQ ID NO: 2155 - protein, 28 aa, Homo sapiens
  Table 3 sequence identifier: O75600_C219
  MOD_RES (23)..(23): May or may not be conjugated to a chemical probe
RLVATDGAFSMDGDIAPLQEICCLASRY

SEQ ID NO: 2156 - protein, 18 aa, Homo sapiens
  Table 3 sequence identifier: O60568_C494
  MOD_RES (16)..(16): May or may not be conjugated to a chemical probe
RDVFSGSDTDPDMAFCKS

SEQ ID NO: 2157 - protein, 26 aa, Homo sapiens
  Table 3 sequence identifier: Q9H0R6_C512
  MOD_RES (17)..(17): May or may not be conjugated to a chemical probe
KQVQFPVIQLQELMDDCSAVLENEKL

SEQ ID NO: 2158 - protein, 11 aa, Homo sapiens
  Table 3 sequence identifier: Q7RTV0_C11
  MOD_RES (9)..(9): May or may not be conjugated to a chemical probe
KHHPDLIFCRK

SEQ ID NO: 2159 - protein, 27 aa, Homo sapiens
  Table 3 sequence identifier: Q96I99_C255
  MOD_RES (22)..(22): May or may not be conjugated to a chemical probe
KIDATQVEVNPFGETPEGQVVCFDAKI

SEQ ID NO: 2160 - protein, 30 aa, Homo sapiens
  Table 3 sequence identifier: A0AVT1_C770
  MOD_RES (8)..(8): May or may not be conjugated to a chemical probe
KLYATVYCIPFAEEDLSADALLNILSEVKI

SEQ ID NO: 2161 - protein, 51 aa, Homo sapiens
  Table 3 sequence identifier: P08047_C755
  MOD_RES (44)..(44): May or may not be conjugated to a chemical probe
KGGPGVALSVGTLPLDSGAGSEGSGTATPSALITTNMVAMEAICPEGIARL

SEQ ID NO: 2162 - protein, 19 aa, Homo sapiens
  Table 3 sequence identifier: P26641_C166
  MOD_RES (11)..(11): May or may not be conjugated to a chemical probe
RVTLADITVVCTLLWLYKQ

SEQ ID NO: 2163 - protein, 22 aa, Homo sapiens
  Table 3 sequence identifier: Q16270_C131
  MOD_RES (18)..(18): May or may not be conjugated to a chemical probe
KSRYPVCGSDGTTYPSGCQLRA

SEQ ID NO: 2164 - protein, 25 aa, Homo sapiens
  Table 3 sequence identifier: Q9BQ52_C51
  MOD_RES (7)..(7): May or may not be conjugated to a chemical probe
KRGPSGCSGGPNTVYLQVVAAGSRD

SEQ ID NO: 2165 - protein, 15 aa, Homo sapiens
  Table 3 sequence identifier: Q6YN16_C11
  MOD_RES (5)..(5): May or may not be conjugated to a chemical probe
RLAGCTVFITGASRG

SEQ ID NO: 2166 - protein, 23 aa, Homo sapiens
  Table 3 sequence identifier: Q9BQP7_C79
  MOD_RES (17)..(17): May or may not be conjugated to a chemical probe
RGVAQTPGSVEEDALLCGPVSKH

SEQ ID NO: 2167 - protein, 48 aa, Homo sapiens
  Table 3 sequence identifier: Q7Z6Z7_C2865
  MOD_RES (28)..(28): May or may not be conjugated to a chemical probe
RAEDSDALTAVSSQLEGSPMDTSSLASCTLEEAVGDTSAAGSSEQPRA

SEQ ID NO: 2168 - protein, 19 aa, Homo sapiens
  Table 3 sequence identifier: Q7Z6Z7_C3259
  MOD_RES (3)..(3): May or may not be conjugated to a chemical probe
KSCGSSSHENRPLDLLHKM

SEQ ID NO: 2169 - protein, 22 aa, Homo sapiens
  Table 3 sequence identifier: Q7Z6Z7_C3658
  MOD_RES (4)..(4): May or may not be conjugated to a chemical probe
RAQCETLSPDGLPEEQPQTTKL

SEQ ID NO: 2170 - protein, 14 aa, Homo sapiens
  Table 3 sequence identifier: Q14914_C239
  MOD_RES (5)..(5): May or may not be conjugated to a chemical probe
RIAICGAISTYNRT

SEQ ID NO: 2171 - protein, 32 aa, Homo sapiens
  Table 3 sequence identifier: O00268_C1022
  MOD_RES (5)..(5): May or may not be conjugated to a chemical probe
RKVDCPGPGSGAEGSGPGSVVPGSSGVGTPRQ

SEQ ID NO: 2172 - protein, 26 aa, Homo sapiens
  Table 3 sequence identifier: O95340_C155
  MOD_RES (22)..(22): May or may not be conjugated to a chemical probe
KIHESAGLPFFEIFVDAPLNICESRD

SEQ ID NO: 2173 - protein, 14 aa, Homo sapiens
  Table 3 sequence identifier: O95295_C66
  MOD_RES (12)..(12): May or may not be conjugated to a chemical probe
REQIDNLATELCRI

SEQ ID NO: 2174 - protein, 32 aa, Homo sapiens
  Table 3 sequence identifier: P43490_C287
  MOD_RES (29)..(29): May or may not be conjugated to a chemical probe
KDAFEHIVTQFSSVPVSVVSDSYDIYNACEKI

SEQ ID NO: 2175 - protein, 38 aa, Homo sapiens
  Table 3 sequence identifier: P49327_C135
  MOD_RES (35)..(35): May or may not be conjugated to a chemical probe
RGTHTGVWVGVSGSETSEALSRDPETLVGYSMVGCQRA

SEQ ID NO: 2176 - protein, 10 aa, Homo sapiens
  Table 3 sequence identifier: Q9Y383_C59
  MOD_RES (7)..(7): May or may not be conjugated to a chemical probe
RMDLGECLKV

SEQ ID NO: 2177 - protein, 48 aa, Homo sapiens
  Table 3 sequence identifier: Q9NS86_C49
  MOD_RES (28)..(28): May or may not be conjugated to a chemical probe
RAFVNPFPDYEAAAGALLASGAAEETGCVRPPATTDEPGLPFHQDGKI

SEQ ID NO: 2178 - protein, 11 aa, Homo sapiens
  Table 3 sequence identifier: Q15149_C317
  MOD_RES (2)..(2): May or may not be conjugated to a chemical probe
RCDNFTSSWRD

SEQ ID NO: 2179 - protein, 11 aa, Homo sapiens
  Table 3 sequence identifier: O60825_C430
  MOD_RES (9)..(9): May or may not be conjugated to a chemical probe
KLTPVAYGCKV

SEQ ID NO: 2180 - protein, 11 aa, Homo sapiens
  Table 3 sequence identifier: Q5JS54_C55
  MOD_RES (8)..(8): May or may not be conjugated to a chemical probe
RNLAVAMCSRY

SEQ ID NO: 2181 - protein, 26 aa, Homo sapiens
  Table 3 sequence identifier: P52566_C76
  MOD_RES (6)..(6): May or may not be conjugated to a chemical probe
RLTLVCESAPGPITMDLTGDLEALKK

SEQ ID NO: 2182 - protein, 11 aa, Homo sapiens
  Table 3 sequence identifier: P07203_C156
  MOD_RES (9)..(9): May or may not be conjugated to a chemical probe
KLITWSPVCRN

SEQ ID NO: 2183 - protein, 13 aa, Homo sapiens
  Table 3 sequence identifier: Q9UL25_C29
  MOD_RES (9)..(9): May or may not be conjugated to a chemical probe
KVVLLGEGCVGKT

SEQ ID NO: 2184 - protein, 23 aa, Homo sapiens
  Table 3 sequence identifier: P49841_C14
  MOD_RES (9)..(9): May or may not be conjugated to a chemical probe
RTTSFAESCKPVQQPSAFGSMKV

SEQ ID NO: 2185 - protein, 27 aa, Homo sapiens
  Table 3 sequence identifier: P17655_C39
  MOD_RES (4)..(4): May or may not be conjugated to a chemical probe
RNECLEAGTLFQDPSFPAIPSALGFKE

SEQ ID NO: 2186 - protein, 11 aa, Homo sapiens
  Table 3 sequence identifier: Q14315_C2679
  MOD_RES (4)..(4): May or may not be conjugated to a chemical probe
KTPCEEVYVKH

SEQ ID NO: 2187 - protein, 13 aa, Homo sapiens
  Table 3 sequence identifier: P32969_C74
  MOD_RES (4)..(4): May or may not be conjugated to a chemical probe
RTICSHVQNMIKG

SEQ ID NO: 2188 - protein, 43 aa, Homo sapiens
  Table 3 sequence identifier: Q96JH7_C1178
  MOD_RES (30)..(30): May or may not be conjugated to a chemical probe
KSGSLQTGLPESFPLTGGTENLNTETTDGCVADALGAAFATRS

SEQ ID NO: 2189 - protein, 13 aa, Homo sapiens
  Table 3 sequence identifier: Q9NP61_C241
  MOD_RES (6)..(6): May or may not be conjugated to a chemical probe
KLANTCFNEIEKQ

SEQ ID NO: 2190 - protein, 26 aa, Homo sapiens
  Table 3 sequence identifier: Q9Y265_C141
  MOD_RES (14)..(14): May or may not be conjugated to a chemical probe
KEVYEGEVTELTPCETENPMGGYGKT

SEQ ID NO: 2191 - protein, 17 aa, Homo sapiens
  Table 3 sequence identifier: P52789_C158
  MOD_RES (12)..(12): May or may not be conjugated to a chemical probe
KLPLGFTFSFPCHQTKL

SEQ ID NO: 2192 - protein, 22 aa, Homo sapiens
  Table 3 sequence identifier: P35579_C172
  MOD_RES (8)..(8): May or may not be conjugated to a chemical probe
REDQSILCTGESGAGKTENTKK

SEQ ID NO: 2193 - protein, 16 aa, Homo sapiens
  Table 3 sequence identifier: P12955_C482
  MOD_RES (13)..(13): May or may not be conjugated to a chemical probe
RTVEEIEACMAGCDKA

SEQ ID NO: 2194 - protein, 10 aa, Homo sapiens
  Table 3 sequence identifier: Q86UX7_C235
  MOD_RES (2)..(2): May or may not be conjugated to a chemical probe
RCLMQQGIKA

SEQ ID NO: 2195 - protein, 11 aa, Homo sapiens
  Table 3 sequence identifier: Q15003_C239
  MOD_RES (2)..(2): May or may not be conjugated to a chemical probe
KCEIDPMFQKT

SEQ ID NO: 2196 - protein, 10 aa, Homo sapiens
  Table 3 sequence identifier: P07814_C1377
  MOD_RES (3)..(3): May or may not be conjugated to a chemical probe
KSCQFVAVRR

SEQ ID NO: 2197 - protein, 15 aa, Homo sapiens
  Table 3 sequence identifier: P11586_C143
  MOD_RES (7)..(7): May or may not be conjugated to a chemical probe
RGDLNDCFIPCTPKG

SEQ ID NO: 2198 - protein, 28 aa, Homo sapiens
  Table 3 sequence identifier: P62312_C36
  MOD_RES (6)..(6): May or may not be conjugated to a chemical probe
RGVLACLDGYMNIALEQTEEYVNGQLKN

SEQ ID NO: 2199 - protein, 34 aa, Homo sapiens
  Table 3 sequence identifier: P55209_C132
  MOD_RES (16)..(16): May or may not be conjugated to a chemical probe
RFEIINAIYEPTEEECEWKPDEEDEISEELKEKA

SEQ ID NO: 2200 - protein, 26 aa, Homo sapiens
  Table 3 sequence identifier: O75815_C699
  MOD_RES (5)..(5): May or may not be conjugated to a chemical probe
RESTCVPPNNVSVPLLMPLVTLMERQ

SEQ ID NO: 2201 - protein, 40 aa, Homo sapiens
  Table 3 sequence identifier: P24534_C191
  MOD_RES (6)..(6): May or may not be conjugated to a chemical probe
KLQIQCVVEDDKVGTDMLEEQITAFEDYVQSMDVAAFNKI

SEQ ID NO: 2202 - protein, 10 aa, Homo sapiens
  Table 3 sequence identifier: P15121_C200
  MOD_RES (6)..(6): May or may not be conjugated to a chemical probe
KLIQYCQSKG

SEQ ID NO: 2203 - protein, 20 aa, Homo sapiens
  Table 3 sequence identifier: Q9GZU8_C187
  MOD_RES (18)..(18): May or may not be conjugated to a chemical probe
RLKPDPEPDDKNQEPSSCKS

SEQ ID NO: 2204 - protein, 34 aa, Homo sapiens
  Table 3 sequence identifier: P25789_C34
  MOD_RES (18)..(18): May or may not be conjugated to a chemical probe
RLYQVEYAMEAIGHAGTCLGILANDGVLLAAERR

SEQ ID NO: 2205 - protein, 26 aa, Homo sapiens
  Table 3 sequence identifier: P25789_C74
  MOD_RES (8)..(8): May or may not be conjugated to a chemical probe
KLNEDMACSVAGITSDANVLTNELRL

SEQ ID NO: 2206 - protein, 18 aa, Homo sapiens
  Table 3 sequence identifier: P07355_C133
  MOD_RES (15)..(15): May or may not be conjugated to a chemical probe
KGLGTDEDSLIEIICSRT

SEQ ID NO: 2207 - protein, 38 aa, Homo sapiens
  Table 3 sequence identifier: Q15393_C410
  MOD_RES (18)..(18): May or may not be conjugated to a chemical probe
KNLVLVDELDSLSPILFCQIADLANEDTPQLYVACGRG

SEQ ID NO: 2208 - protein, 22 aa, Homo sapiens
  Table 3 sequence identifier: P63244_C240
  MOD_RES (16)..(16): May or may not be conjugated to a chemical probe
KHLYTLDGGDIINALCFSPNRY

SEQ ID NO: 2209 - protein, 10 aa, Homo sapiens
  Table 3 sequence identifier: P61247_C111
  MOD_RES (5)..(5): May or may not be conjugated to a chemical probe
RDKMCSMVKK

SEQ ID NO: 2210 - protein, 17 aa, Homo sapiens
  Table 3 sequence identifier: P53582_C40
  MOD_RES (14)..(14): May or may not be conjugated to a chemical probe
KLGIQGSYFCSQECFKG

SEQ ID NO: 2211 - protein, 8 aa, Homo sapiens
  Table 3 sequence identifier: P23921_C790
  MOD_RES (6)..(6): May or may not be conjugated to a chemical probe
DECLMCGS

SEQ ID NO: 2212 - protein, 17 aa, Homo sapiens
  Table 3 sequence identifier: Q9BT78_C378
  MOD_RES (7)..(7): May or may not be conjugated to a chemical probe
KQIQSLCFQVNNLLEKI

SEQ ID NO: 2213 - protein, 21 aa, Homo sapiens
  Table 3 sequence identifier: Q7KZ85_C336
  MOD_RES (15)..(15): May or may not be conjugated to a chemical probe
RNAFATPTISLQESCDYLDRG

SEQ ID NO: 2214 - protein, 15 aa, Homo sapiens
  Table 3 sequence identifier: P23381_C274
  MOD_RES (11)..(11): May or may not be conjugated to a chemical probe
KGIFGFTDSDCIGKI

SEQ ID NO: 2215 - protein, 20 aa, Homo sapiens
  Table 3 sequence identifier: P36551_C239
  MOD_RES (8)..(8): May or may not be conjugated to a chemical probe
KDGKLPFCAMGVSSVIHPKN

SEQ ID NO: 2216 - protein, 13 aa, Homo sapiens
  Table 3 sequence identifier: Q7KZF4_C31
  MOD_RES (7)..(7): May or may not be conjugated to a chemical probe
KMVLSGCAIIVRG

SEQ ID NO: 2217 - protein, 41 aa, Homo sapiens
  Table 3 sequence identifier: Q14139_C1002
  MOD_RES (31)..(31): May or may not be conjugated to a chemical probe
KSLADLQQQEEETYADACDEFLDPIMSTLMCDPVVLPSSRV

SEQ ID NO: 2218 - protein, 35 aa, Homo sapiens
  Table 3 sequence identifier: Q8NCF5_C232
  MOD_RES (3)..(3): May or may not be conjugated to a chemical probe
RSCLSPKPPQGQEQQGQEDEVVLVEGPTLPETPRL

SEQ ID NO: 2219 - protein, 25 aa, Homo sapiens
  Table 3 sequence identifier: O75934_C106
  MOD_RES (10)..(10): May or may not be conjugated to a chemical probe
KNDITAWQECVNNSMAQLEHQAVRI

SEQ ID NO: 2220 - protein, 24 aa, Homo sapiens
  Table 3 sequence identifier: Q96IF1_C158
  MOD_RES (20)..(20): May or may not be conjugated to a chemical probe
RGSLLLDGAGAGGAGGSRPCSNRT

SEQ ID NO: 2221 - protein, 38 aa, Homo sapiens
  Table 3 sequence identifier: Q9NZL4_C22
  MOD_RES (13)..(13): May or may not be conjugated to a chemical probe
RLPLALPPASQGCSSGGGGGGGGGSSAGGSGNSRPPRN

SEQ ID NO: 2222 - protein, 17 aa, Homo sapiens
  Table 3 sequence identifier: Q9NZL9_C58
  MOD_RES (13)..(13): May or may not be conjugated to a chemical probe
KEFQQNNWHAVGCGFRR

SEQ ID NO: 2223 - protein, 27 aa, Homo sapiens
  Table 3 sequence identifier: Q5TDH0_C361
  MOD_RES (24)..(24): May or may not be conjugated to a chemical probe
KNVLVIGTTGSQTTFLPEGELPECARL

SEQ ID NO: 2224 - protein, 19 aa, Homo sapiens
  Table 3 sequence identifier: Q13126_C131
  MOD_RES (16)..(16): May or may not be conjugated to a chemical probe
RTTMRPQSFYDGSHSCARG

SEQ ID NO: 2225 - protein, 15 aa, Homo sapiens
  Table 3 sequence identifier: O75369_C706
  MOD_RES (8)..(8): May or may not be conjugated to a chemical probe
RMDGTYACSYTPVKA

SEQ ID NO: 2226 - protein, 8 aa, Homo sapiens
  Table 3 sequence identifier: P21980_C269
  MOD_RES (5)..(5): May or may not be conjugated to a chemical probe
KNHGCQRV

SEQ ID NO: 2227 - protein, 19 aa, Homo sapiens
  Table 3 sequence identifier: Q16270_C113
  MOD_RES (17)..(17): May or may not be conjugated to a chemical probe
KAGAAAGGPGVSGVCVCKS

SEQ ID NO: 2228 - protein, 11 aa, Homo sapiens
  Table 3 sequence identifier: H7BZ11_C88
  MOD_RES (9)..(9): May or may not be conjugated to a chemical probe
RLECVEPNCRS

SEQ ID NO: 2229 - protein, 9 aa, Homo sapiens
  Table 3 sequence identifier: Q96FZ2_C131
  MOD_RES (2)..(2): May or may not be conjugated to a chemical probe
RCQGTNQRQ

SEQ ID NO: 2230 - protein, 11 aa, Homo sapiens
  Table 3 sequence identifier: Q6YN16_C71
  MOD_RES (5)..(5): May or may not be conjugated to a chemical probe
KALPCIVDVRD

SEQ ID NO: 2231 - protein, 15 aa, Homo sapiens
  Table 3 sequence identifier: Q9UBL3_C581
  MOD_RES (12)..(12): May or may not be conjugated to a chemical probe
KSCTVSINFGPCFKY

SEQ ID NO: 2232 - protein, 27 aa, Homo sapiens
  Table 3 sequence identifier: Q15370_C60
  MOD_RES (6)..(6): May or may not be conjugated to a chemical probe
KTLGECGFTSQTARPQAPATVGLAFRA

SEQ ID NO: 2233 - protein, 9 aa, Homo sapiens
  Table 3 sequence identifier: O43252_C360
  MOD_RES (7)..(7): May or may not be conjugated to a chemical probe
RQWGTTCKN

SEQ ID NO: 2234 - protein, 9 aa, Homo sapiens
  Table 3 sequence identifier: P62633_C171
  MOD_RES (3)..(3): May or may not be conjugated to a chemical probe
RECTIEATA

SEQ ID NO: 2235 - protein, 9 aa, Homo sapiens
  Table 3 sequence identifier: P63151_C398
  MOD_RES (4)..(4): May or may not be conjugated to a chemical probe
RKVCASGKR

SEQ ID NO: 2236 - protein, 17 aa, Homo sapiens
  Table 3 sequence identifier: Q16881_C209
  MOD_RES (8)..(8): May or may not be conjugated to a chemical probe
RWGLGGTCVNVGCIPKK

SEQ ID NO: 2237 - protein, 26 aa, Homo sapiens
  Table 3 sequence identifier: O95294_C761
  MOD_RES (19)..(19): May or may not be conjugated to a chemical probe
KLLEDSNMDTTLEADTGACPEVLARQ

SEQ ID NO: 2238 - protein, 14 aa, Homo sapiens
  Table 3 sequence identifier: Q9UQ35_C872
  MOD_RES (3)..(3): May or may not be conjugated to a chemical probe
RSCFESSPDPELKS

SEQ ID NO: 2239 - protein, 8 aa, Homo sapiens
  Table 3 sequence identifier: P78371_C535
  MOD_RES (8)..(8): May or may not be conjugated to a chemical probe
RVPDHHPC

SEQ ID NO: 2240 - protein, 20 aa, Homo sapiens
  Table 3 sequence identifier: P54577_C250
  MOD_RES (4)..(4): May or may not be conjugated to a chemical probe
KAFCEPGNVENNGVLSFIKH

SEQ ID NO: 2241 - protein, 20 aa, Homo sapiens
  Table 3 sequence identifier: Q8TD30_C477
  MOD_RES (9)..(9): May or may not be conjugated to a chemical probe
KLLEETGICVVPGSGFGQRE

SEQ ID NO: 2242 - protein, 11 aa, Homo sapiens
  Table 3 sequence identifier: Q15149_C3299
  MOD_RES (3)..(3): May or may not be conjugated to a chemical probe
RGCLDEETSRA

SEQ ID NO: 2243 - protein, 29 aa, Homo sapiens
  Table 3 sequence identifier: O14744_C278
  MOD_RES (4)..(4): May or may not be conjugated to a chemical probe
KEFCSYLQYLEYLSQNRPPPNAYELFAKG

SEQ ID NO: 2244 - protein, 26 aa, Homo sapiens
  Table 3 sequence identifier: Q7L1Q6_C96
  MOD_RES (5)..(5): May or may not be conjugated to a chemical probe
RTDVCVFAAQEDLETMQAFAQVFNKL

SEQ ID NO: 2245 - protein, 18 aa, Homo sapiens
  Table 3 sequence identifier: P04181_C150
  MOD_RES (16)..(16): May or may not be conjugated to a chemical probe
KVLPMNTGVEAGETACKL

SEQ ID NO: 2246 - protein, 41 aa, Homo sapiens
  Table 3 sequence identifier: P04181_C330
  MOD_RES (39)..(39): May or may not be conjugated to a chemical probe
KALSGGLYPVSAVLCDDDIMLTIKPGEHGSTYGGNPLGCRV

SEQ ID NO: 2247 - protein, 8 aa, Homo sapiens
  Table 3 sequence identifier: Q9NVT9_C69
  MOD_RES (6)..(6): May or may not be conjugated to a chemical probe
RYLAECRA

SEQ ID NO: 2248 - protein, 20 aa, Homo sapiens
  Table 3 sequence identifier: O60888_C96
  MOD_RES (5)..(5): May or may not be conjugated to a chemical probe
RLAACVNLIPQITSIYEWKG

SEQ ID NO: 2249 - protein, 20 aa, Homo sapiens
  Table 3 sequence identifier: Q6P2E9_C976
  MOD_RES (3)..(3): May or may not be conjugated to a chemical probe
RLCTQLEGLQSTVTGHVERA

SEQ ID NO: 2250 - protein, 15 aa, Homo sapiens
  Table 3 sequence identifier: P20810_C408
  MOD_RES (13)..(13): May or may not be conjugated to a chemical probe
KAAAPAPVSEAVCRT

SEQ ID NO: 2251 - protein, 28 aa, Homo sapiens
  Table 3 sequence identifier: Q5T6F2_C208
  MOD_RES (24)..(24): May or may not be conjugated to a chemical probe
RFSTQGMGTFNPADYSDSTSTDVCGTKL

SEQ ID NO: 2252 - protein, 16 aa, Homo sapiens
  Table 3 sequence identifier: Q9BQ61_C165
  MOD_RES (5)..(5): May or may not be conjugated to a chemical probe
KAHQCGDDDKTRPLVK

SEQ ID NO: 2253 - protein, 19 aa, Homo sapiens
  Table 3 sequence identifier: P54687_C12
  MOD_RES (11)..(11): May or may not be conjugated to a chemical probe
KDCSNGCSAECTGEGGSKE

SEQ ID NO: 2254 - protein, 22 aa, Homo sapiens
  Table 3 sequence identifier: P54687_C335
  MOD_RES (10)..(10): May or may not be conjugated to a chemical probe
REMFGSGTACVVCPVSDILYKG

SEQ ID NO: 2255 - protein, 17 aa, Homo sapiens
  Table 3 sequence identifier: Q96I15_C22
  MOD_RES (14)..(14): May or may not be conjugated to a chemical probe
RDAPAPAASQPSGCGKH

SEQ ID NO: 2256 - protein, 25 aa, Homo sapiens
  Table 3 sequence identifier: P45974_C335
  MOD_RES (7)..(7): May or may not be conjugated to a chemical probe
RNLGNSCYLNSVVQVLFSIPDFQRK

SEQ ID NO: 2257 - protein, 31 aa, Homo sapiens
  Table 3 sequence identifier: O14497_C336
  MOD_RES (10)..(10): May or may not be conjugated to a chemical probe
KGPADMASQCWGAAAAAAAAAAASGGAQQRS

SEQ ID NO: 2258 - protein, 16 aa, Homo sapiens
  Table 3 sequence identifier: O43776_C438
  MOD_RES (14)..(14): May or may not be conjugated to a chemical probe
RLMTDTINEPILLCRF

SEQ ID NO: 2259 - protein, 22 aa, Homo sapiens
  Table 3 sequence identifier: P12955_C467
  MOD_RES (18)..(18): May or may not be conjugated to a chemical probe
RIEEDVVVTDSGIELLTCVPRT

SEQ ID NO: 2260 - protein, 20 aa, Homo sapiens
  Table 3 sequence identifier: Q9Y678_C97
  MOD_RES (5)..(5): May or may not be conjugated to a chemical probe
KEMSCIAEDVIIVTSSLTKD

SEQ ID NO: 2261 - protein, 9 aa, Homo sapiens
  Table 3 sequence identifier: Q9Y678_C169
  MOD_RES (2)..(2): May or may not be conjugated to a chemical probe
KCSFDVVKR

SEQ ID NO: 2262 - protein, 9 aa, Homo sapiens
  Table 3 sequence identifier: P55786_C339
  MOD_RES (4)..(4): May or may not be conjugated to a chemical probe
KNSCSSSRQ

SEQ ID NO: 2263 - protein, 11 aa, Homo sapiens
  Table 3 sequence identifier: Q9Y520_C223
  MOD_RES (4)..(4): May or may not be conjugated to a chemical probe
RIACGPPQAKL

SEQ ID NO: 2264 - protein, 34 aa, Homo sapiens
  Table 3 sequence identifier: P52306_C29
  MOD_RES (18)..(18): May or may not be conjugated to a chemical probe
KITAVDKTEDSLEGCLDCLLQALAQNNTETSEKI

SEQ ID NO: 2265 - protein, 18 aa, Homo sapiens
  Table 3 sequence identifier: Q6GMV2_C194
  MOD_RES (15)..(15): May or may not be conjugated to a chemical probe
LFSQFCNKRLFSQFCNKT

SEQ ID NO: 2266 - protein, 20 aa, Homo sapiens
  Table 3 sequence identifier: Q16763_C95
  MOD_RES (14)..(14): May or may not be conjugated to a chemical probe
KIFHPNVGANGEICVNVLKR

SEQ ID NO: 2267 - protein, 21 aa, Homo sapiens
  Table 3 sequence identifier: Q7L014_C590
  MOD_RES (5)..(5): May or may not be conjugated to a chemical probe
RSVVCSDVEQQVIVIEEEKKF

SEQ ID NO: 2268 - protein, 12 aa, Homo sapiens
  Table 3 sequence identifier: Q8NFX7_C144
  MOD_RES (8)..(8): May or may not be conjugated to a chemical probe
RKPEFINCQSKI

SEQ ID NO: 2269 - protein, 16 aa, Homo sapiens
  Table 3 sequence identifier: P56537_C11
  MOD_RES (8)..(8): May or may not be conjugated to a chemical probe
RASFENNCEIGCFAKL

SEQ ID NO: 2270 - protein, 43 aa, Homo sapiens
  Table 3 sequence identifier: Q9NRL3_C17
  MOD_RES (13)..(13): May or may not be conjugated to a chemical probe
RAAAAVAAAASSCRPLGSGAGPGPTGAAPVSAPAPGPGPAGKG

SEQ ID NO: 2271 - protein, 24 aa, Homo sapiens
  Table 3 sequence identifier: P41252_C185
  MOD_RES (9)..(9): May or may not be conjugated to a chemical probe
KVMPFSTACNTPLSNFESHQNYKD

SEQ ID NO: 2272 - protein, 14 aa, Homo sapiens
  Table 3 sequence identifier: O60343_C45
  MOD_RES (9)..(9): May or may not be conjugated to a chemical probe
RLWYVGGSCLDHRT

SEQ ID NO: 2273 - protein, 11 aa, Homo sapiens
  Table 3 sequence identifier: P30086_C133
  MOD_RES (2)..(2): May or may not be conjugated to a chemical probe
KCDEPILSNRS

SEQ ID NO: 2274 - protein, 14 aa, Homo sapiens
  Table 3 sequence identifier: Q9NQW7_C308
  MOD_RES (2)..(2): May or may not be conjugated to a chemical probe
RCCMPYTPICIAKA

SEQ ID NO: 2275 - protein, 15 aa, Homo sapiens
  Table 3 sequence identifier: O00299_C89
  MOD_RES (11)..(11): May or may not be conjugated to a chemical probe
KIEEFLEAVLCPPRY

SEQ ID NO: 2276 - protein, 16 aa, Homo sapiens
  Table 3 sequence identifier: Q9Y4B6_C784
  MOD_RES (8)..(8): May or may not be conjugated to a chemical probe
KLPLFSSCQIQQLMKE

SEQ ID NO: 2277 - protein, 11 aa, Homo sapiens
  Table 3 sequence identifier: Q66PJ3_C349
  MOD_RES (4)..(4): May or may not be conjugated to a chemical probe
RGDCLAFQMRA

SEQ ID NO: 2278 - protein, 22 aa, Homo sapiens
  Table 3 sequence identifier: P00367_C327
  MOD_RES (2)..(2): May or may not be conjugated to a chemical probe
KCIAVGESDGSIWNPDGIDPKE

SEQ ID NO: 2279 - protein, 20 aa, Homo sapiens
  Table 3 sequence identifier: Q14C86_C568
  MOD_RES (5)..(5): May or may not be conjugated to a chemical probe
RFSLCSDNLEGISEGPSNRS

SEQ ID NO: 2280 - protein, 28 aa, Homo sapiens
  Table 3 sequence identifier: P09382_C89
  MOD_RES (16)..(16): May or may not be conjugated to a chemical probe
REAVFPFQPGSVAEVCITFDQANLTVKL

SEQ ID NO: 2281 - protein, 20 aa, Homo sapiens
  Table 3 sequence identifier: O00244_C41
  MOD_RES (3)..(3): May or may not be conjugated to a chemical probe
KVCIESEHSMDTLLATLKKT

SEQ ID NO: 2282 - protein, 9 aa, Homo sapiens
  Table 3 sequence identifier: P16885_C624
  MOD_RES (2)..(2): May or may not be conjugated to a chemical probe
RCAEFELRL

SEQ ID NO: 2283 - protein, 14 aa, Homo sapiens
  Table 3 sequence identifier: Q92835_C138
  MOD_RES (10)..(10): May or may not be conjugated to a chemical probe
RNIPLTASSCEAKE

SEQ ID NO: 2284 - protein, 12 aa, Homo sapiens
  Table 3 sequence identifier: J3QR44_C430
  MOD_RES (8)..(8): May or may not be conjugated to a chemical probe
RSVEEFQCLNRI

SEQ ID NO: 2285 - protein, 31 aa, Homo sapiens
  Table 3 sequence identifier: Q9P289_C352
  MOD_RES (17)..(17): May or may not be conjugated to a chemical probe
KKVQNGAEQDLVQTLSCLSMIITPAFAELKQ

SEQ ID NO: 2286 - protein, 10 aa, Homo sapiens
  Table 3 sequence identifier: Q92688_C27
  MOD_RES (8)..(8): May or may not be conjugated to a chemical probe
RELVLDNCKS

SEQ ID NO: 2287 - protein, 16 aa, Homo sapiens
  Table 3 sequence identifier: Q96GX9_C97
  MOD_RES (4)..(4): May or may not be conjugated to a chemical probe
KSQCTPLFMNAYTMRG

SEQ ID NO: 2288 - protein, 16 aa, Homo sapiens
  Table 3 sequence identifier: Q15004_C54
  MOD_RES (9)..(9): May or may not be conjugated to a chemical probe
KYAGGNPVCVRPTPKW

SEQ ID NO: 2289 - protein, 11 aa, Homo sapiens
  Table 3 sequence identifier: O75083_C325
  MOD_RES (5)..(5): May or may not be conjugated to a chemical probe
KSIQCLTVHKN

SEQ ID NO: 2290 - protein, 22 aa, Homo sapiens
  Table 3 sequence identifier: O43252_C207
  MOD_RES (5)..(5): May or may not be conjugated to a chemical probe
KTDSCDVNDCVQQVVELLQERD

SEQ ID NO: 2291 - protein, 11 aa, Homo sapiens
  Table 3 sequence identifier: P62633_C161
  MOD_RES (2)..(2): May or may not be conjugated to a chemical probe
RCGESGHLARE

SEQ ID NO: 2292 - protein, 12 aa, Homo sapiens
  Table 3 sequence identifier: Q7Z6Z7_C1832
  MOD_RES (8)..(8): May or may not be conjugated to a chemical probe
RHIIEDPCTLRH

SEQ ID NO: 2293 - protein, 41 aa, Homo sapiens
  Table 3 sequence identifier: Q8NCW5_C91
  MOD_RES (34)..(34): May or may not be conjugated to a chemical probe
KYLSQEEAQAVDQELFNEYQFSVDQLMELAGLSCATAIAKA

SEQ ID NO: 2294 - protein, 13 aa, Homo sapiens
  Table 3 sequence identifier: P31949_C13
  MOD_RES (2)..(2): May or may not be conjugated to a chemical probe
RCIESLIAVFQKY

SEQ ID NO: 2295 - protein, 10 aa, Homo sapiens
  Table 3 sequence identifier: P07900_C572
  MOD_RES (8)..(8): May or may not be conjugated to a chemical probe
KTKFENLCKI

SEQ ID NO: 2296 - protein, 23 aa, Homo sapiens
  Table 3 sequence identifier: Q86UA6_C122
  MOD_RES (2)..(2): May or may not be conjugated to a chemical probe
KCLSIMLAEWEANPLICPVCTKY

SEQ ID NO: 2297 - protein, 12 aa, Homo sapiens
  Table 3 sequence identifier: Q8N6M0_C172
  MOD_RES (3)..(3): May or may not be conjugated to a chemical probe
KDCALTVVALRS

SEQ ID NO: 2298 - protein, 18 aa, Homo sapiens
  Table 3 sequence identifier: Q13153_C411
  MOD_RES (8)..(8): May or may not be conjugated to a chemical probe
KLTDFGFCAQITPEQSKR

SEQ ID NO: 2299 - protein, 19 aa, Homo sapiens
  Table 3 sequence identifier: O60232_C53
  MOD_RES (7)..(7): May or may not be conjugated to a chemical probe
RMLGETCADCGTILLQDKQ

SEQ ID NO: 2300 - protein, 31 aa, Homo sapiens
  Table 3 sequence identifier: Q9NQY0_C72
  MOD_RES (12)..(12): May or may not be conjugated to a chemical probe
KISLDLLSNPLCEQDQDLLNMVTALDTAMKR

SEQ ID NO: 2301 - protein, 13 aa, Homo sapiens
  Table 3 sequence identifier: O60942_C419
  MOD_RES (9)..(9): May or may not be conjugated to a chemical probe
RNKPFFDICTSRK

SEQ ID NO: 2302 - protein, 14 aa, Homo sapiens
  Table 3 sequence identifier: P13804_C155
  MOD_RES (10)..(10): May or may not be conjugated to a chemical probe
RTIYAGNALCTVKC

SEQ ID NO: 2303 - protein, 16 aa, Homo sapiens
  Table 3 sequence identifier: Q96QR8_C17
  MOD_RES (8)..(8): May or may not be conjugated to a chemical probe
RGGGGGPCGFQPASRG

SEQ ID NO: 2304 - protein, 19 aa, Homo sapiens
  Table 3 sequence identifier: O60711_C199
  MOD_RES (7)..(7): May or may not be conjugated to a chemical probe
RSGLAYCPNDYHQLFSPRC

SEQ ID NO: 2305 - protein, 22 aa, Homo sapiens
  Table 3 sequence identifier: Q00013_C242
  MOD_RES (16)..(16): May or may not be conjugated to a chemical probe
RVASMAQSAPSEAPSCSPFGKK

SEQ ID NO: 2306 - protein, 21 aa, Homo sapiens
  Table 3 sequence identifier: P52597_C290
  MOD_RES (16)..(16): May or may not be conjugated to a chemical probe
RYGDSEFTVQSTTGHCVHMRG

SEQ ID NO: 2307 - protein, 30 aa, Homo sapiens
  Table 3 sequence identifier: P09211_C102
  MOD_RES (28)..(28): May or may not be conjugated to a chemical probe
RTLGLYGKDQQEAALVDMVNDGVEDLRCKY

SEQ ID NO: 2308 - protein, 14 aa, Homo sapiens
  Table 3 sequence identifier: Q15149_C950
  MOD_RES (10)..(10): May or may not be conjugated to a chemical probe
RGRLPLLAVCDYKQ

SEQ ID NO: 2309 - protein, 14 aa, Homo sapiens
  Table 3 sequence identifier: P62195_C209
  MOD_RES (9)..(9): May or may not be conjugated to a chemical probe
RAVAHHTDCTFIRV

SEQ ID NO: 2310 - protein, 10 aa, Homo sapiens
  Table 3 sequence identifier: Q9Y2Q3_C176
  MOD_RES (8)..(8): May or may not be conjugated to a chemical probe
KETTEAACRY

SEQ ID NO: 2311 - protein, 40 aa, Homo sapiens
  Table 3 sequence identifier: O15164_C629
  MOD_RES (28)..(28): May or may not be conjugated to a chemical probe
KAFGSPMIDLSSPVGGSYNLPSLPDIDCSSTIMLDNIVRK

SEQ ID NO: 2312 - protein, 15 aa, Homo sapiens
  Table 3 sequence identifier: P22314_C234
  MOD_RES (9)..(9): May or may not be conjugated to a chemical probe
KDNPGVVTCLDEARH

SEQ ID NO: 2313 - protein, 16 aa, Homo sapiens
  Table 3 sequence identifier: Q96HE7_C94
  MOD_RES (13)..(13): May or may not be conjugated to a chemical probe
KRPCPFWNDISQCGRR

SEQ ID NO: 2314 - protein, 21 aa, Homo sapiens
  Table 3 sequence identifier: P07203_C78
  MOD_RES (10)..(10): May or may not be conjugated to a chemical probe
RGLVVLGFPCNQFGHQENAKN

SEQ ID NO: 2315 - protein, 19 aa, Homo sapiens
  Table 3 sequence identifier: P21964_C238
  MOD_RES (5)..(5): May or may not be conjugated to a chemical probe
RGSSCFECTHYQSFLEYRE

SEQ ID NO: 2316 - protein, 27 aa, Homo sapiens
  Table 3 sequence identifier: O76071_C72
  MOD_RES (8)..(8): May or may not be conjugated to a chemical probe
RKVAWSPCGNYLASASFDATTCIWKKN

SEQ ID NO: 2317 - protein, 22 aa, Homo sapiens
  Table 3 sequence identifier: P04083_C324
  MOD_RES (8)..(8): May or may not be conjugated to a chemical probe
KMYGISLCQAILDETKGDYEKI

SEQ ID NO: 2318 - protein, 42 aa, Homo sapiens
  Table 3 sequence identifier: Q14315_C1109
  MOD_RES (4)..(4): May or may not be conjugated to a chemical probe
KIECQDNGDGSCAVSYLPTEPGEYTINILFAEAHIPGSPFKA

SEQ ID NO: 2319 - protein, 9 aa, Homo sapiens
  Table 3 sequence identifier: Q13526_C57
  MOD_RES (2)..(2): May or may not be conjugated to a chemical probe
RCSHLLVKH

SEQ ID NO: 2320 - protein, 47 aa, Homo sapiens
  Table 3 sequence identifier: Q9Y3B2_C170
  MOD_RES (40)..(40): May or may not be conjugated to a chemical probe
KVISLGDAQSNYLLTTAENELGVVVAHSESGIQMVPISWCEMQCPKT

SEQ ID NO: 2321 - protein, 22 aa, Homo sapiens
  Table 3 sequence identifier: P54687_C140
  MOD_RES (15)..(15): May or may not be conjugated to a chemical probe
RATLPVFDKEELLECIQQLVKL

SEQ ID NO: 2322 - protein, 8 aa, Homo sapiens
  Table 3 sequence identifier: Q92945_C379
  MOD_RES (2)..(2): May or may not be conjugated to a chemical probe
RCEHAARI

SEQ ID NO: 2323 - protein, 32 aa, Homo sapiens
  Table 3 sequence identifier: Q13148_C198
  MOD_RES (2)..(2): May or may not be conjugated to a chemical probe
RCTEDMTEDELREFFSQYGDVMDVFIPKPFRA

SEQ ID NO: 2324 - protein, 20 aa, Homo sapiens
  Table 3 sequence identifier: Q9Y3C4_C167
  MOD_RES (18)..(18): May or may not be conjugated to a chemical probe
KLSSQEESIGTLLDAIICRM

SEQ ID NO: 2325 - protein, 21 aa, Homo sapiens
  Table 3 sequence identifier: O43175_C281
  MOD_RES (12)..(12): May or may not be conjugated to a chemical probe
RALVDHENVISCPHLGASTKE

SEQ ID NO: 2326 - protein, 30 aa, Homo sapiens
  Table 3 sequence identifier: Q16698_C285
  MOD_RES (16)..(16): May or may not be conjugated to a chemical probe
RLGTVEELANLAAFLCSDYASWINGAVIKF

SEQ ID NO: 2327 - protein, 22 aa, Homo sapiens
  Table 3 sequence identifier: P49773_C38
  MOD_RES (2)..(2): May or may not be conjugated to a chemical probe
RCLAFHDISPQAPTHFLVIPKK

SEQ ID NO: 2328 - protein, 41 aa, Homo sapiens
  Table 3 sequence identifier: P12004_C27
  MOD_RES (14)..(14): May or may not be conjugated to a chemical probe
KVLEALKDLINEACWDISSSGVNLQSMDSSHVSLVQLTLRS

SEQ ID NO: 2329 - protein, 25 aa, Homo sapiens
  Table 3 sequence identifier: P51553_C81
  MOD_RES (4)..(4): May or may not be conjugated to a chemical probe
RHACVPVDFEEVHVSSNADEEDIRN

SEQ ID NO: 2330 - protein, 18 aa, Homo sapiens
  Table 3 sequence identifier: Q14192_C214
  MOD_RES (12)..(12): May or may not be conjugated to a chemical probe
RDDFAYCLNCFCDLYAKK

SEQ ID NO: 2331 - protein, 27 aa, Homo sapiens
  Table 3 sequence identifier: P07814_C381
  MOD_RES (12)..(12): May or may not be conjugated to a chemical probe
KYNVYPTYDFACPIVDSIEGVTHALRT

SEQ ID NO: 2332 - protein, 15 aa, Homo sapiens
  Table 3 sequence identifier: Q8WWY3_C247
  MOD_RES (5)..(5): May or may not be conjugated to a chemical probe
KMPACNIMLLGAQRK

SEQ ID NO: 2333 - protein, 16 aa, Homo sapiens
  Table 3 sequence identifier: Q13085_C813
  MOD_RES (11)..(11): May or may not be conjugated to a chemical probe
KRPGAALDPGCVLAKM

SEQ ID NO: 2334 - protein, 51 aa, Homo sapiens
  Table 3 sequence identifier: O43765_C38
  MOD_RES (19)..(19): May or may not be conjugated to a chemical probe
RHGGLSSDAQESLEVAIQCLETAFGVTVEDSDLALPQTLPEIFEAAATGKE

SEQ ID NO: 2335 - protein, 14 aa, Homo sapiens
  Table 3 sequence identifier: Q13185_C160
  MOD_RES (2)..(2): May or may not be conjugated to a chemical probe
KCPQIVIAFYEERL

SEQ ID NO: 2336 - protein, 25 aa, Homo sapiens
  Table 3 sequence identifier: Q9UBR2_C164
  MOD_RES (5)..(5): May or may not be conjugated to a chemical probe
KDQECDKFNQCGTCNEFKECHAIRN

SEQ ID NO: 2337 - protein, 19 aa, Homo sapiens
  Table 3 sequence identifier: P54886_C612
  MOD_RES (8)..(8): May or may not be conjugated to a chemical probe
KCEYPAACNALETLLIHRD

SEQ ID NO: 2338 - protein, 34 aa, Homo sapiens
  Table 3 sequence identifier: Q9H9E3_C494
  MOD_RES (31)..(31): May or may not be conjugated to a chemical probe
RALSSSSIDCLCAMINLATTELESDFRDVLCNKL

SEQ ID NO: 2339 - protein, 26 aa, Homo sapiens
  Table 3 sequence identifier: P19623_C209
  MOD_RES (16)..(16): May or may not be conjugated to a chemical probe
KTALKEDGVLCCQGECQWLHLDLIKE

SEQ ID NO: 2340 - protein, 16 aa, Homo sapiens
  Table 3 sequence identifier: P61247_C201
  MOD_RES (3)..(3): May or may not be conjugated to a chemical probe
KACQSIYPLHDVFVRK

SEQ ID NO: 2341 - protein, 16 aa, Homo sapiens
  Table 3 sequence identifier: P15311_C284
  MOD_RES (6)..(6): May or may not be conjugated to a chemical probe
RILQLCMGNHELYMRR

SEQ ID NO: 2342 - protein, 11 aa, Homo sapiens
  Table 3 sequence identifier: P53004_C204
  MOD_RES (5)..(5): May or may not be conjugated to a chemical probe
KMTVCLETEKK

SEQ ID NO: 2343 - protein, 11 aa, Homo sapiens
  Table 3 sequence identifier: Q969E8_C114
  MOD_RES (6)..(6): May or may not be conjugated to a chemical probe
REMASCITQRK

SEQ ID NO: 2344 - protein, 29 aa, Homo sapiens
  Table 3 sequence identifier: P41252_C350
  MOD_RES (7)..(7): May or may not be conjugated to a chemical probe
KDSLPVCPVDASGCFTTEVTDFAGQYVKD

SEQ ID NO: 2345 - protein, 11 aa, Homo sapiens
  Table 3 sequence identifier: O60343_C316
  MOD_RES (2)..(2): May or may not be conjugated to a chemical probe
RCSSVTGVQRR

SEQ ID NO: 2346 - protein, 23 aa, Homo sapiens
  Table 3 sequence identifier: Q96JB2_C349
  MOD_RES (11)..(11): May or may not be conjugated to a chemical probe
RELLLGPSIACTVAELTSQNNRD

SEQ ID NO: 2347 - protein, 35 aa, Homo sapiens
  Table 3 sequence identifier: Q9Y490_C1978
  MOD_RES (6)..(6): May or may not be conjugated to a chemical probe
RGTQACITAASAVSGIIADLDTTIMFATAGTLNRE

SEQ ID NO: 2348 - protein, 47 aa, Homo sapiens
  Table 3 sequence identifier: P23381_C62
  MOD_RES (12)..(12): May or may not be conjugated to a chemical probe
KAAAGEDYKADCPPGNPAPTSNHGPDATEAEEDFVDPWTVQTSSAKG

SEQ ID NO: 2349 - protein, 15 aa, Homo sapiens
  Table 3 sequence identifier: P27708_C280
  MOD_RES (7)..(7): May or may not be conjugated to a chemical probe
RGHNQPCLLVGSGRC

SEQ ID NO: 2350 - protein, 33 aa, Homo sapiens
  Table 3 sequence identifier: Q9Y3Z3_C80
  MOD_RES (15)..(15): May or may not be conjugated to a chemical probe
KNIRENEITGALLPCLDESRFENLGVSSLGERK

SEQ ID NO: 2351 - protein, 13 aa, Homo sapiens
  Table 3 sequence identifier: Q53H96_C49
  MOD_RES (4)..(4): May or may not be conjugated to a chemical probe
RNLCHFQALGCRT

SEQ ID NO: 2352 - protein, 14 aa, Homo sapiens
  Table 3 sequence identifier: Q9HCC0_C431
  MOD_RES (8)..(8): May or may not be conjugated to a chemical probe
KMVAAVACAQVPKI

SEQ ID NO: 2353 - protein, 11 aa, Homo sapiens
  Table 3 sequence identifier: P47897_C358
  MOD_RES (7)..(7): May or may not be conjugated to a chemical probe
RGLAYVCHQRG

SEQ ID NO: 2354 - protein, 22 aa, Homo sapiens
  Table 3 sequence identifier: P55084_C435
  MOD_RES (20)..(20): May or may not be conjugated to a chemical probe
KFNNWGGSLSLGHPFGATGCRL

SEQ ID NO: 2355 - protein, 29 aa, Homo sapiens
  Table 3 sequence identifier: P30405_C157
  MOD_RES (25)..(25): May or may not be conjugated to a chemical probe
KHVGPGVLSMANAGPNTNGSQFFICTIKT

SEQ ID NO: 2356 - protein, 24 aa, Homo sapiens
  Table 3 sequence identifier: P08567_C160
  MOD_RES (11)..(11): May or may not be conjugated to a chemical probe
KIFNHCFTGNCVIDWLVSNQSVRN

SEQ ID NO: 2357 - protein, 34 aa, Homo sapiens
  Table 3 sequence identifier: A6NHR9_C84
  MOD_RES (5)..(5): May or may not be conjugated to a chemical probe
KEITCDNFDETVKDGVTLYLLQSVNQLLLTATKE

SEQ ID NO: 2358 - protein, 17 aa, Homo sapiens
  Table 3 sequence identifier: Q9Y2X3_C439
  MOD_RES (14)..(14): May or may not be conjugated to a chemical probe
KTYDPSGDSTLPTCSKK

SEQ ID NO: 2359 - protein, 22 aa, Homo sapiens
  Table 3 sequence identifier: O00410_C420
  MOD_RES (5)..(5): May or may not be conjugated to a chemical probe
RYAACNAVGQMATDFAPGFQKK

SEQ ID NO: 2360 - protein, 17 aa, Homo sapiens
  Table 3 sequence identifier: P09382_C61
  MOD_RES (13)..(13): May or may not be conjugated to a chemical probe
RFNAHGDANTIVCNSKD

SEQ ID NO: 2361 - protein, 11 aa, Homo sapiens
  Table 3 sequence identifier: O75150_C950
  MOD_RES (6)..(6): May or may not be conjugated to a chemical probe
RLTCPCCNTRK

SEQ ID NO: 2362 - protein, 51 aa, Homo sapiens
  Table 3 sequence identifier: P11021_C420
  MOD_RES (35)..(35): May or may not be conjugated to a chemical probe
RGINPDEAVAYGAAVQAGVLSGDQDTGDLVLLDVCPLTLGIETVGGVMTKL

SEQ ID NO: 2363 - protein, 28 aa, Homo sapiens
  Table 3 sequence identifier: P29401_C133
  MOD_RES (20)..(20): May or may not be conjugated to a chemical probe
KQAFTDVATGSLGQGLGAACGMAYTGKY

SEQ ID NO: 2364 - protein, 14 aa, Homo sapiens
  Table 3 sequence identifier: Q92598_C658
  MOD_RES (4)..(4): May or may not be conjugated to a chemical probe
KFICEQDHQNFLRL

SEQ ID NO: 2365 - protein, 14 aa, Homo sapiens
  Table 3 sequence identifier: O43795_C129
  MOD_RES (11)..(11): May or may not be conjugated to a chemical probe
KLVMSYVAAVCGKG

SEQ ID NO: 2366 - protein, 13 aa, Homo sapiens
  Table 3 sequence identifier: O75369_C1326
  MOD_RES (8)..(8): May or may not be conjugated to a chemical probe
KVAVTEGCQPSRV

SEQ ID NO: 2367 - protein, 43 aa, Homo sapiens
  Table 3 sequence identifier: Q70E73_C94
  MOD_RES (27)..(27): May or may not be conjugated to a chemical probe
RFSIYNLNEALNQGETVDLDALMADLCSIEQELSSIGSGNSKR

SEQ ID NO: 2368 - protein, 12 aa, Homo sapiens
  Table 3 sequence identifier: Q0PNE2_C218
  MOD_RES (10)..(10): May or may not be conjugated to a chemical probe
RAEGLATGFCRD

SEQ ID NO: 2369 - protein, 25 aa, Homo sapiens
  Table 3 sequence identifier: Q12996_C628
  MOD_RES (8)..(8): May or may not be conjugated to a chemical probe
KLLPPPICFQGPFVQVDELMEIFRR

SEQ ID NO: 2370 - protein, 25 aa, Homo sapiens
  Table 3 sequence identifier: P09543_C49
  MOD_RES (23)..(23): May or may not be conjugated to a chemical probe
KDKPELQFPFLQDEDTVATLLECKT

SEQ ID NO: 2371 - protein, 9 aa, Homo sapiens
  Table 3 sequence identifier: Q8WVV9_C405
  MOD_RES (5)..(5): May or may not be conjugated to a chemical probe
RLNVCVSKQ

SEQ ID NO: 2372 - protein, 11 aa, Homo sapiens
  Table 3 sequence identifier: Q8N4X5_C467
  MOD_RES (4)..(4): May or may not be conjugated to a chemical probe
RVSCIVSAAKN

SEQ ID NO: 2373 - protein, 15 aa, Homo sapiens
  Table 3 sequence identifier: Q8IUI8_C313
  MOD_RES (7)..(7): May or may not be conjugated to a chemical probe
RAPTYFCGQTLTFRV

SEQ ID NO: 2374 - protein, 17 aa, Homo sapiens
  Table 3 sequence identifier: Q9BPX3_C843
  MOD_RES (11)..(11): May or may not be conjugated to a chemical probe
KICNEILTSPCSPEIRV

SEQ ID NO: 2375 - protein, 15 aa, Homo sapiens
  Table 3 sequence identifier: P30566_C27
  MOD_RES (8)..(8): May or may not be conjugated to a chemical probe
RYASPEMCFVFSDRY

SEQ ID NO: 2376 - protein, 13 aa, Homo sapiens
  Table 3 sequence identifier: O00469_C494
  MOD_RES (11)..(11): May or may not be conjugated to a chemical probe
RDKLDPDMALCRN

SEQ ID NO: 2377 - protein, 10 aa, Homo sapiens
  Table 3 sequence identifier: Q92616_C55
  MOD_RES (4)..(4): May or may not be conjugated to a chemical probe
KLFCLTLHRY

SEQ ID NO: 2378 - protein, 13 aa, Homo sapiens
  Table 3 sequence identifier: P49327_C212
  MOD_RES (11)..(11): May or may not be conjugated to a chemical probe
RLGMLSPEGTCKA

SEQ ID NO: 2379 - protein, 19 aa, Homo sapiens
  Table 3 sequence identifier: P42166_C330
  MOD_RES (16)..(16): May or may not be conjugated to a chemical probe
KETTTGYYKDIVENICGRE

SEQ ID NO: 2380 - protein, 30 aa, Homo sapiens
  Table 3 sequence identifier: P55769_C73
  MOD_RES (26)..(26): May or may not be conjugated to a chemical probe
RGISEFIVMAADAEPLEIILHLPLLCEDKN

SEQ ID NO: 2381 - protein, 18 aa, Homo sapiens
  Table 3 sequence identifier: Q9UQ35_C2116
  MOD_RES (4)..(4): May or may not be conjugated to a chemical probe
RMSCFSRPSMSPTPLDRC

SEQ ID NO: 2382 - protein, 12 aa, Homo sapiens
  Table 3 sequence identifier: P01591_C91
  MOD_RES (10)..(10): May or may not be conjugated to a chemical probe
RFVYHLSDLCKK

SEQ ID NO: 2383 - protein, 25 aa, Homo sapiens
  Table 3 sequence identifier: P61970_C38
  MOD_RES (13)..(13): May or may not be conjugated to a chemical probe
RTQLGAIYIDASCLTWEGQQFQGKA

SEQ ID NO: 2384 - protein, 22 aa, Homo sapiens
  Table 3 sequence identifier: O94953_C547
  MOD_RES (11)..(11): May or may not be conjugated to a chemical probe
KAAFNQEHVSCQQAFEHFAQKG

SEQ ID NO: 2385 - protein, 14 aa, Homo sapiens
  Table 3 sequence identifier: Q15149_C730
  MOD_RES (3)..(3): May or may not be conjugated to a chemical probe
RDCLGRLDLQYAKL

SEQ ID NO: 2386 - protein, 16 aa, Homo sapiens
  Table 3 sequence identifier: Q9ULW0_C301
  MOD_RES (3)..(3): May or may not be conjugated to a chemical probe
KGCTIVKPFNLSQGKK

SEQ ID NO: 2387 - protein, 28 aa, Homo sapiens
  Table 3 sequence identifier: Q9UNF1_C516
  MOD_RES (15)..(15): May or may not be conjugated to a chemical probe
RMGIGLGSENAAGPCNWDEADIGPWAKA

SEQ ID NO: 2388 - protein, 19 aa, Homo sapiens
  Table 3 sequence identifier: P51808_C8
  MOD_RES (3)..(3): May or may not be conjugated to a chemical probe
RHCDEVGFNAEEAHNIVKE

SEQ ID NO: 2389 - protein, 16 aa, Homo sapiens
  Table 3 sequence identifier: Q09666_C5502
  MOD_RES (5)..(5): May or may not be conjugated to a chemical probe
KSSGCDVNLPGVNVKL

SEQ ID NO: 2390 - protein, 11 aa, Homo sapiens
  Table 3 sequence identifier: P27348_C25
  MOD_RES (8)..(8): May or may not be conjugated to a chemical probe
RYDDMATCMKA

SEQ ID NO: 2391 - protein, 25 aa, Homo sapiens
  Table 3 sequence identifier: Q8WUM0_C811
  MOD_RES (14)..(14): May or may not be conjugated to a chemical probe
RNIVTEQLVALIDCFLDGYVSQLKS

SEQ ID NO: 2392 - protein, 16 aa, Homo sapiens
  Table 3 sequence identifier: P52789_C628
  MOD_RES (5)..(5): May or may not be conjugated to a chemical probe
KASGCEGEDVVTLLKE

SEQ ID NO: 2393 - protein, 25 aa, Homo sapiens
  Table 3 sequence identifier: O60716_C618
  MOD_RES (20)..(20): May or may not be conjugated to a chemical probe
RYQEAAPNVANNTGPHAASCFGAKK

SEQ ID NO: 2394 - protein, 18 aa, Homo sapiens
  Table 3 sequence identifier: P26599_C251
  MOD_RES (14)..(14): May or may not be conjugated to a chemical probe
KLSLDGQNIYNACCTLRI

SEQ ID NO: 2395 - protein, 8 aa, Homo sapiens
  Table 3 sequence identifier: P23528_C147
  MOD_RES (2)..(2): May or may not be conjugated to a chemical probe
RCTLAEKL

SEQ ID NO: 2396 - protein, 27 aa, Homo sapiens
  Table 3 sequence identifier: Q14694_C94
  MOD_RES (22)..(22): May or may not be conjugated to a chemical probe
RTPSYSISSTLNPQAPEFILGCTASKI

SEQ ID NO: 2397 - protein, 16 aa, Homo sapiens
  Table 3 sequence identifier: P36507_C384
  MOD_RES (14)..(14): May or may not be conjugated to a chemical probe
RSEVEEVDFAGWLCKT

SEQ ID NO: 2398 - protein, 12 aa, Homo sapiens
  Table 3 sequence identifier: Q9UJX3_C259
  MOD_RES (7)..(7): May or may not be conjugated to a chemical probe
RAISTICSLEKK

SEQ ID NO: 2399 - protein, 27 aa, Homo sapiens
  Table 3 sequence identifier: Q9BV20_C168
  MOD_RES (8)..(8): May or may not be conjugated to a chemical probe
KVTVLTHCNTGALATAGYGTALGVIRS

SEQ ID NO: 2400 - protein, 19 aa, Homo sapiens
  Table 3 sequence identifier: Q9Y696_C189
  MOD_RES (13)..(13): May or may not be conjugated to a chemical probe
KFLDGNEMTLADCNLLPKL

SEQ ID NO: 2401 - protein, 34 aa, Homo sapiens
  Table 3 sequence identifier: Q6ZMK1_C342
  MOD_RES (31)..(31): May or may not be conjugated to a chemical probe
RISPVIYHFVFTNESNETDYVPLPIIDSVECNKL

SEQ ID NO: 2402 - protein, 23 aa, Homo sapiens
  Table 3 sequence identifier: P45954_C139
  MOD_RES (10)..(10): May or may not be conjugated to a chemical probe
KVDASVAVFCEIQNTLINTLIRK

SEQ ID NO: 2403 - protein, 20 aa, Homo sapiens
  Table 3 sequence identifier: P15121_C187
  MOD_RES (11)..(11): May or may not be conjugated to a chemical probe
KYKPAVNQIECHPYLTQEKL

SEQ ID NO: 2404 - protein, 9 aa, Homo sapiens
  Table 3 sequence identifier: Q9NR50_C64
  MOD_RES (4)..(4): May or may not be conjugated to a chemical probe
KALCAEFKM

SEQ ID NO: 2405 - protein, 22 aa, Homo sapiens
  Table 3 sequence identifier: Q14980_C1907
  MOD_RES (9)..(9): May or may not be conjugated to a chemical probe
RNSFYMGTCQDEPEQLDDWNRI

SEQ ID NO: 2406 - protein, 16 aa, Homo sapiens
  Table 3 sequence identifier: O43707_C793
  MOD_RES (3)..(3): May or may not be conjugated to a chemical probe
KACLISLGYDVENDRQ

SEQ ID NO: 2407 - protein, 15 aa, Homo sapiens
  Table 3 sequence identifier: O43707_C879
  MOD_RES (11)..(11): May or may not be conjugated to a chemical probe
RELPPDQAEYCIARM

SEQ ID NO: 2408 - protein, 29 aa, Homo sapiens
  Table 3 sequence identifier: Q9NPA3_C62
  MOD_RES (24)..(24): May or may not be conjugated to a chemical probe
RDVPLADPGLDNDVGVEVGGSGGCLEERT

SEQ ID NO: 2409 - protein, 12 aa, Homo sapiens
  Table 3 sequence identifier: Q5UIP0_C2450
  MOD_RES (4)..(4): May or may not be conjugated to a chemical probe
KLSCMANSVIKN

SEQ ID NO: 2410 - protein, 20 aa, Homo sapiens
  Table 3 sequence identifier: P41134_C17
  MOD_RES (16)..(16): May or may not be conjugated to a chemical probe
KVASGSTATAAAGPSCALKA

SEQ ID NO: 2411 - protein, 34 aa, Homo sapiens
  Table 3 sequence identifier: Q13509_C129
  MOD_RES (8)..(8): May or may not be conjugated to a chemical probe
KECENCDCLQGFQLTHSLGGGTGSGMGTLLISKV

SEQ ID NO: 2412 - protein, 18 aa, Homo sapiens
  Table 3 sequence identifier: Q16718_C17
  MOD_RES (11)..(11): May or may not be conjugated to a chemical probe
KTTGLVGLAVCNTPHERL

SEQ ID NO: 2413 - protein, 20 aa, Homo sapiens
  Table 3 sequence identifier: Q9H6K1_C18
  MOD_RES (4)..(4): May or may not be conjugated to a chemical probe
KFSCLGTTDKDVLISEFQRL

SEQ ID NO: 2414 - protein, 13 aa, Homo sapiens
  Table 3 sequence identifier: Q13057_C144
  MOD_RES (10)..(10): May or may not be conjugated to a chemical probe
RYATSCYSCCPRL

SEQ ID NO: 2415 - protein, 20 aa, Homo sapiens
  Table 3 sequence identifier: P28838_C313
  MOD_RES (11)..(11): May or may not be conjugated to a chemical probe
RADMGGAATICSAIVSAAKL

SEQ ID NO: 2416 - protein, 31 aa, Homo sapiens
  Table 3 sequence identifier: Q96EP0_C504
  MOD_RES (9)..(9): May or may not be conjugated to a chemical probe
REGEAAGACPEEIFSALQYSGTEVPLQWLRS

SEQ ID NO: 2417 - protein, 24 aa, Homo sapiens
  Table 3 sequence identifier: P08107_C17
  MOD_RES (15)..(15): May or may not be conjugated to a chemical probe
KAAAIGIDLGTTYSCVGVFQHGKV

SEQ ID NO: 2418 - protein, 12 aa, Homo sapiens
  Table 3 sequence identifier: P27708_C1455
  MOD_RES (6)..(6): May or may not be conjugated to a chemical probe
KVHVDCMTSQKL

SEQ ID NO: 2419 - protein, 10 aa, Homo sapiens
  Table 3 sequence identifier: P23497_C309
  MOD_RES (4)..(4): May or may not be conjugated to a chemical probe
KVECQAQART

SEQ ID NO: 2420 - protein, 11 aa, Homo sapiens
  Table 3 sequence identifier: P11498_C739
  MOD_RES (8)..(8): May or may not be conjugated to a chemical probe
RAGTHILCIKD

SEQ ID NO: 2421 - protein, 11 aa, Homo sapiens
  Table 3 sequence identifier: Q02790_C396
  MOD_RES (7)..(7): May or may not be conjugated to a chemical probe
KTQLAVCQQRI

SEQ ID NO: 2422 - protein, 19 aa, Homo sapiens
  Table 3 sequence identifier: P48507_C35
  MOD_RES (4)..(4): May or may not be conjugated to a chemical probe
RKKCPSTHSEELHDCIQKT

SEQ ID NO: 2423 - protein, 19 aa, Homo sapiens
  Table 3 sequence identifier: P55735_C245
  MOD_RES (7)..(7): May or may not be conjugated to a chemical probe
RVFIWTCDDASSNTWSPKL

SEQ ID NO: 2424 - protein, 25 aa, Homo sapiens
  Table 3 sequence identifier: P00367_C376
  MOD_RES (14)..(14): May or may not be conjugated to a chemical probe
KAKPYEGSILEADCDILIPAASEKQ

SEQ ID NO: 2425 - protein, 26 aa, Homo sapiens
  Table 3 sequence identifier: P52701_C1075
  MOD_RES (8)..(8): May or may not be conjugated to a chemical probe
RGGDGPMCRPVILLPEDTPPFLELKG

SEQ ID NO: 2426 - protein, 19 aa, Homo sapiens
  Table 3 sequence identifier: Q14166_C612
  MOD_RES (16)..(16): May or may not be conjugated to a chemical probe
RVMQPQILEVNFNPDCERA

SEQ ID NO: 2427 - protein, 33 aa, Homo sapiens
  Table 3 sequence identifier: Q6PKG0_C502
  MOD_RES (26)..(26): May or may not be conjugated to a chemical probe
REEPEKWPLPPIVDYSQTDFSQLLNCPEFVPRQ

SEQ ID NO: 2428 - protein, 18 aa, Homo sapiens
  Table 3 sequence identifier: Q9NVS9_C156
  MOD_RES (10)..(10): May or may not be conjugated to a chemical probe
KKLPEEEAECYFHSRPKS

SEQ ID NO: 2429 - protein, 22 aa, Homo sapiens
  Table 3 sequence identifier: Q99873_C93
  MOD_RES (16)..(16): May or may not be conjugated to a chemical probe
KDKVVLDVGSGTGILCMFAAKA

SEQ ID NO: 2430 - protein, 18 aa, Homo sapiens
  Table 3 sequence identifier: Q9H4A6_C84
  MOD_RES (11)..(11): May or may not be conjugated to a chemical probe
KEGYTSFWNDCISSGLRG

SEQ ID NO: 2431 - protein, 17 aa, Homo sapiens
  Table 3 sequence identifier: P78347_C34
  MOD_RES (15)..(15): May or may not be conjugated to a chemical probe
RMVVTFLMSALESMCKE

SEQ ID NO: 2432 - protein, 18 aa, Homo sapiens
  Table 3 sequence identifier: Q96FZ2_C39
  MOD_RES (12)..(12): May or may not be conjugated to a chemical probe
RLPEWRDPDKYCPSYNKS

SEQ ID NO: 2433 - protein, 18 aa, Homo sapiens
  Table 3 sequence identifier: O60547_C336
  MOD_RES (15)..(15): May or may not be conjugated to a chemical probe
KYYRPTEVDFLQGDCTKA

SEQ ID NO: 2434 - protein, 14 aa, Homo sapiens
  Table 3 sequence identifier: P62979_C149
  MOD_RES (7)..(7): May or may not be conjugated to a chemical probe
KCCLTYCFNKPEDK

SEQ ID NO: 2435 - protein, 12 aa, Homo sapiens
  Table 3 sequence identifier: P52732_C911
  MOD_RES (4)..(4): May or may not be conjugated to a chemical probe
KLNCFLEQDLKL

SEQ ID NO: 2436 - protein, 24 aa, Homo sapiens
  Table 3 sequence identifier: P40938_C32
  MOD_RES (6)..(6): May or may not be conjugated to a chemical probe
RNLVQCGDFPHLLVYGPSGAGKKT

SEQ ID NO: 2437 - protein, 8 aa, Homo sapiens
  Table 3 sequence identifier: P31943_C34
  MOD_RES (6)..(6): May or may not be conjugated to a chemical probe
RFFSDCKI

SEQ ID NO: 2438 - protein, 19 aa, Homo sapiens
  Table 3 sequence identifier: Q8N1F7_C422
  MOD_RES (6)..(6): May or may not be conjugated to a chemical probe
KLNQVCFDDDGTSSPQDRL

SEQ ID NO: 2439 - protein, 11 aa, Homo sapiens
  Table 3 sequence identifier: Q16643_C96
  MOD_RES (2)..(2): May or may not be conjugated to a chemical probe
KCACASHVAKV

SEQ ID NO: 2440 - protein, 13 aa, Homo sapiens
  Table 3 sequence identifier: P45880_C76
  MOD_RES (3)..(3): May or may not be conjugated to a chemical probe
KWCEYGLTFTEKW

SEQ ID NO: 2441 - protein, 16 aa, Homo sapiens
  Table 3 sequence identifier: Q9BYG5_C13
  MOD_RES (8)..(8): May or may not be conjugated to a chemical probe
RHGAGSGCLGTMEVKS

SEQ ID NO: 2442 - protein, 23 aa, Homo sapiens
  Table 3 sequence identifier: P42765_C128
  MOD_RES (20)..(20): May or may not be conjugated to a chemical probe
KEAEVVLCGGTESMSQAPYCVRN

SEQ ID NO: 2443 - protein, 22 aa, Homo sapiens
  Table 3 sequence identifier: Q96HC4_C213
  MOD_RES (9)..(9): May or may not be conjugated to a chemical probe
RQPTVTSVCSETSQELAEGQRR

SEQ ID NO: 2444 - protein, 12 aa, Homo sapiens
  Table 3 sequence identifier: O15042_C320
  MOD_RES (3)..(3): May or may not be conjugated to a chemical probe
RNCGFVAFMNRR

SEQ ID NO: 2445 - protein, 13 aa, Homo sapiens
  Table 3 sequence identifier: Q96IY1_C224
  MOD_RES (10)..(10): May or may not be conjugated to a chemical probe
RIHQEVFSSCHRK

SEQ ID NO: 2446 - protein, 10 aa, Homo sapiens
  Table 3 sequence identifier: P12270_C1068
  MOD_RES (4)..(4): May or may not be conjugated to a chemical probe
RRDCQEQAKI

SEQ ID NO: 2447 - protein, 29 aa, Homo sapiens
  Table 3 sequence identifier: P01591_C156
  MOD_RES (26)..(26): May or may not be conjugated to a chemical probe
MVETALTPDACYPDKMVETALTPDACYPD

SEQ ID NO: 2448 - protein, 19 aa, Homo sapiens
  Table 3 sequence identifier: P53992_C1083
  MOD_RES (14)..(14): May or may not be conjugated to a chemical probe
KSLSGGASYVDFLCHMHKE

SEQ ID NO: 2449 - protein, 24 aa, Homo sapiens
  Table 3 sequence identifier: Q92973_C142
  MOD_RES (3)..(3): May or may not be conjugated to a chemical probe
KLCSLLDSEDYNTCEGAFGALQKI

SEQ ID NO: 2450 - protein, 23 aa, Homo sapiens
  Table 3 sequence identifier: P32321_C60
  MOD_RES (14)..(14): May or may not be conjugated to a chemical probe
KIVGIGYNGMPNGCSDDVLPWRR

SEQ ID NO: 2451 - protein, 21 aa, Homo sapiens
  Table 3 sequence identifier: P62195_C112
  MOD_RES (19)..(19): May or may not be conjugated to a chemical probe
KFVVDVDKNIDINDVTPNCRV

SEQ ID NO: 2452 - protein, 18 aa, Homo sapiens
  Table 3 sequence identifier: P31146_C40
  MOD_RES (12)..(12): May or may not be conjugated to a chemical probe
RVSQTTWDSGFCAVNPKF

SEQ ID NO: 2453 - protein, 24 aa, Homo sapiens
  Table 3 sequence identifier: P12814_C774
  MOD_RES (3)..(3): May or may not be conjugated to a chemical probe
KACLISLGYDIGNDPQGEAEFARI

SEQ ID NO: 2454 - protein, 13 aa, Homo sapiens
  Table 3 sequence identifier: Q04726_C528
  MOD_RES (9)..(9): May or may not be conjugated to a chemical probe
KSPISQLDCLNRD

SEQ ID NO: 2455 - protein, 14 aa, Homo sapiens
  Table 3 sequence identifier: Q52LJ0_C216
  MOD_RES (8)..(8): May or may not be conjugated to a chemical probe
RINDALSCEYECRR

SEQ ID NO: 2456 - protein, 14 aa, Homo sapiens
  Table 3 sequence identifier: P04083_C270
  MOD_RES (2)..(2): May or may not be conjugated to a chemical probe
KCATSKPAFFAEKL

SEQ ID NO: 2457 - protein, 16 aa, Homo sapiens
  Table 3 sequence identifier: O94925_C203
  MOD_RES (2)..(2): May or may not be conjugated to a chemical probe
KCVQSNIVLLTQAFRR

SEQ ID NO: 2458 - protein, 20 aa, Homo sapiens
  Table 3 sequence identifier: Q9GZP4_C187
  MOD_RES (7)..(7): May or may not be conjugated to a chemical probe
RHEVTICNYEASANPADHRV

SEQ ID NO: 2459 - protein, 21 aa, Homo sapiens
  Table 3 sequence identifier: P33764_C14
  MOD_RES (12)..(12): May or may not be conjugated to a chemical probe
RPLEQAVAAIVCTFQEYAGRC

SEQ ID NO: 2460 - protein, 13 aa, Homo sapiens
  Table 3 sequence identifier: Q9UKK9_C76
  MOD_RES (7)..(7): May or may not be conjugated to a chemical probe
RTLHYECIVLVKQ

SEQ ID NO: 2461 - protein, 19 aa, Homo sapiens
  Table 3 sequence identifier: P38117_C71
  MOD_RES (13)..(13): May or may not be conjugated to a chemical probe
KEVIAVSCGPAQCQETIRT

SEQ ID NO: 2462 - protein, 33 aa, Homo sapiens
  Table 3 sequence identifier: O95817_C151
  MOD_RES (13)..(13): May or may not be conjugated to a chemical probe
RGMPETTQPDKQCGQVAAAAAAQPPASHGPERS

SEQ ID NO: 2463 - protein, 25 aa, Homo sapiens
  Table 3 sequence identifier: Q27J81_C898
  MOD_RES (8)..(8): May or may not be conjugated to a chemical probe
RELADYLCEDAQQLSLEDTFSTMKA

SEQ ID NO: 2464 - protein, 26 aa, Homo sapiens
  Table 3 sequence identifier: Q9C0C2_C1443
  MOD_RES (2)..(2): May or may not be conjugated to a chemical probe
RCPARPPPSGSQGLLEEMLAASSSKA

SEQ ID NO: 2465 - protein, 26 aa, Homo sapiens
  Table 3 sequence identifier: Q9C0C9_C314
  MOD_RES (4)..(4): May or may not be conjugated to a chemical probe
KSFCPGGTDSVSPPPSVITQENLGRV

SEQ ID NO: 2466 - protein, 33 aa, Homo sapiens
  Table 3 sequence identifier: P84090_C69
  MOD_RES (28)..(28): May or may not be conjugated to a chemical probe
RMNPNSPSITYDISQLFDFIDDLADLSCLVYRA

SEQ ID NO: 2467 - protein, 16 aa, Homo sapiens
  Table 3 sequence identifier: Q8TDN6_C52
  MOD_RES (14)..(14): May or may not be conjugated to a chemical probe
IPGPVCKRIPGPVCKG

SEQ ID NO: 2468 - protein, 31 aa, Homo sapiens
  Table 3 sequence identifier: P42704_C484
  MOD_RES (22)..(22): May or may not be conjugated to a chemical probe
KGMQELGVHPDQETYTDYVIPCFDSVNSARA

SEQ ID NO: 2469 - protein, 11 aa, Homo sapiens
  Table 3 sequence identifier: Q9NR56_C53
  MOD_RES (5)..(5): May or may not be conjugated to a chemical probe
RVIACFDSLKG

SEQ ID NO: 2470 - protein, 20 aa, Homo sapiens
  Table 3 sequence identifier: P14678_C43
  MOD_RES (12)..(12): May or may not be conjugated to a chemical probe
KAFDKHMNLILCDCDEFRKI

SEQ ID NO: 2471 - protein, 14 aa, Homo sapiens
  Table 3 sequence identifier: Q86VP6_C1134
  MOD_RES (6)..(6): May or may not be conjugated to a chemical probe
RLSTLCPSAVLQRL

SEQ ID NO: 2472 - protein, 13 aa, Homo sapiens
  Table 3 sequence identifier: P14324_C333
  MOD_RES (2)..(2): May or may not be conjugated to a chemical probe
KCSWLVVQCLQRA

SEQ ID NO: 2473 - protein, 10 aa, Homo sapiens
  Table 3 sequence identifier: P07237_C312
  MOD_RES (5)..(5): May or may not be conjugated to a chemical probe
KKEECPAVRL

SEQ ID NO: 2474 - protein, 11 aa, Homo sapiens
  Table 3 sequence identifier: Q9BXJ9_C238
  MOD_RES (9)..(9): May or may not be conjugated to a chemical probe
KGELLLQLCRL

SEQ ID NO: 2475 - protein, 20 aa, Homo sapiens
  Table 3 sequence identifier: Q99614_C28
  MOD_RES (10)..(10): May or may not be conjugated to a chemical probe
KVTDTQEAECAGPPVPDPKN

SEQ ID NO: 2476 - protein, 19 aa, Homo sapiens
  Table 3 sequence identifier: Q9UDY2_C914
  MOD_RES (15)..(15): May or may not be conjugated to a chemical probe
RMSYLTAMGADYLSCDSRL

SEQ ID NO: 2477 - protein, 10 aa, Homo sapiens
  Table 3 sequence identifier: Q06210_C254
  MOD_RES (5)..(5): May or may not be conjugated to a chemical probe
KKGSCNLSRV

SEQ ID NO: 2478 - protein, 10 aa, Homo sapiens
  Table 3 sequence identifier: P55199_C14
  MOD_RES (7)..(7): May or may not be conjugated to a chemical probe
RSYGLSCGRV

SEQ ID NO: 2479 - protein, 13 aa, Homo sapiens
  Table 3 sequence identifier: Q9H2U2_C180
  MOD_RES (5)..(5): May or may not be conjugated to a chemical probe
KILSCGEVIHVKI

SEQ ID NO: 2480 - protein, 21 aa, Homo sapiens
  Table 3 sequence identifier: Q6UB35_C779
  MOD_RES (16)..(16): May or may not be conjugated to a chemical probe
KEYTEENIQLVADGCCNLQKQ

SEQ ID NO: 2481 - protein, 15 aa, Homo sapiens
  Table 3 sequence identifier: P34897_C80
  MOD_RES (12)..(12): May or may not be conjugated to a chemical probe
RGLELIASENFCSRA

SEQ ID NO: 2482 - protein, 24 aa, Homo sapiens
  Table 3 sequence identifier: P13798_C30
  MOD_RES (9)..(9): May or may not be conjugated to a chemical probe
RQPALSAACLGPEVTTQYGGQYRT

SEQ ID NO: 2483 - protein, 12 aa, Homo sapiens
  Table 3 sequence identifier: O95671_C333
  MOD_RES (7)..(7): May or may not be conjugated to a chemical probe
KVDASACGMERL

SEQ ID NO: 2484 - protein, 16 aa, Homo sapiens
  Table 3 sequence identifier: O95671_C441
  MOD_RES (5)..(5): May or may not be conjugated to a chemical probe
KLTACQVATAFNLSRF

SEQ ID NO: 2485 - protein, 14 aa, Homo sapiens
  Table 3 sequence identifier: Q9NQW6_C309
  MOD_RES (3)..(3): May or may not be conjugated to a chemical probe
KSCEGQNPELLPKT

SEQ ID NO: 2486 - protein, 16 aa, Homo sapiens
  Table 3 sequence identifier: Q04206_C109
  MOD_RES (2)..(2): May or may not be conjugated to a chemical probe
RCIHSFQNLGIQCVKK

SEQ ID NO: 2487 - protein, 16 aa, Homo sapiens
  Table 3 sequence identifier: P31350_C202
  MOD_RES (13)..(13): May or may not be conjugated to a chemical probe
REFLFNAIETMPCVKK

SEQ ID NO: 2488 - protein, 12 aa, Homo sapiens
  Table 3 sequence identifier: P08107_C306
  MOD_RES (6)..(6): May or may not be conjugated to a chemical probe
RFEELCSDLFRS

SEQ ID NO: 2489 - protein, 19 aa, Homo sapiens
  Table 3 sequence identifier: O75914_C424
  MOD_RES (8)..(8): May or may not be conjugated to a chemical probe
KLTDFGFCAQITPEQSKRS

SEQ ID NO: 2490 - protein, 19 aa, Homo sapiens
  Table 3 sequence identifier: P27708_C379
  MOD_RES (3)..(3): May or may not be conjugated to a chemical probe
RLCPPGIPTPGSGLPPPRK

SEQ ID NO: 2491 - protein, 15 aa, Homo sapiens
  Table 3 sequence identifier: P62910_C96
  MOD_RES (4)..(4): May or may not be conjugated to a chemical probe
KSYCAEIAHNVSSKN

SEQ ID NO: 2492 - protein, 33 aa, Homo sapiens
  Table 3 sequence identifier: Q9Y570_C347
  MOD_RES (10)..(10): May or may not be conjugated to a chemical probe
KFQMQVLPQCGHAVHEDAPDKVAEAVATFLIRH

SEQ ID NO: 2493 - protein, 18 aa, Homo sapiens
  Table 3 sequence identifier: Q92499_C110
  MOD_RES (13)..(13): May or may not be conjugated to a chemical probe
RGSAFAIGSDGLCCQSRE

SEQ ID NO: 2494 - protein, 11 aa, Homo sapiens
  Table 3 sequence identifier: P30405_C203
  MOD_RES (7)..(7): May or may not be conjugated to a chemical probe
KIVITDCGQLS

SEQ ID NO: 2495 - protein, 23 aa, Homo sapiens
  Table 3 sequence identifier: Q92621_C1662
  MOD_RES (2)..(2): May or may not be conjugated to a chemical probe
RCQDVSAGSLQELALLTGIISKA

SEQ ID NO: 2496 - protein, 37 aa, Homo sapiens
  Table 3 sequence identifier: Q14376_C196
  MOD_RES (13)..(13): May or may not be conjugated to a chemical probe
RYFNPTGAHASGCIGEDPQGIPNNLMPYVSQVAIGRR

SEQ ID NO: 2497 - protein, 23 aa, Homo sapiens
  Table 3 sequence identifier: O75717_C1008
  MOD_RES (11)..(11): May or may not be conjugated to a chemical probe
KNVLSETPAICPPQNTENQRPKT

SEQ ID NO: 2498 - protein, 26 aa, Homo sapiens
  Table 3 sequence identifier: Q03933_C369
  MOD_RES (13)..(13): May or may not be conjugated to a chemical probe
KVELLDYLDSIDCSLEDFQAMLSGRQ

SEQ ID NO: 2499 - protein, 19 aa, Homo sapiens
  Table 3 sequence identifier: Q00535_C290
  MOD_RES (17)..(17): May or may not be conjugated to a chemical probe
RISAEEALQHPYFSDFCPP

SEQ ID NO: 2500 - protein, 12 aa, Homo sapiens
  Table 3 sequence identifier: B5ME19_C753
  MOD_RES (3)..(3): May or may not be conjugated to a chemical probe
KTCHSFIINEKM

SEQ ID NO: 2501 - protein, 21 aa, Homo sapiens
  Table 3 sequence identifier: Q9NVP2_C189
  MOD_RES (8)..(8): May or may not be conjugated to a chemical probe
KGLGLPGCIPGLLPENSMDCI

SEQ ID NO: 2502 - protein, 10 aa, Homo sapiens
  Table 3 sequence identifier: Q13018_C1354
  MOD_RES (5)..(5): May or may not be conjugated to a chemical probe
KPHHCVALRI

SEQ ID NO: 2503 - protein, 17 aa, Homo sapiens
  Table 3 sequence identifier: Q15181_C242
  MOD_RES (5)..(5): May or may not be conjugated to a chemical probe
KGISCMNTTLSESPFKC

SEQ ID NO: 2504 - protein, 19 aa, Homo sapiens
  Table 3 sequence identifier: Q7Z5K2_C1170
  MOD_RES (10)..(10): May or may not be conjugated to a chemical probe
KFLSFMNLTCAVGTTGQKS

SEQ ID NO: 2505 - protein, 15 aa, Homo sapiens
  Table 3 sequence identifier: Q13642_C71
  MOD_RES (2)..(2): May or may not be conjugated to a chemical probe
KCLHPLANETFVAKD

SEQ ID NO: 2506 - protein, 31 aa, Homo sapiens
  Table 3 sequence identifier: P48556_C274
  MOD_RES (27)..(27): May or may not be conjugated to a chemical probe
KGNIPAESYTFFIDILLDTIRDEIAGCIEKA

SEQ ID NO: 2507 - protein, 34 aa, Homo sapiens
  Table 3 sequence identifier: Q9UBL3_C362
  MOD_RES (21)..(21): May or may not be conjugated to a chemical probe
RYILAEPDPHAPDPEKLELDCWAGKPIPGDLYRA

SEQ ID NO: 2508 - protein, 26 aa, Homo sapiens
  Table 3 sequence identifier: Q8TBB5_C373
  MOD_RES (12)..(12): May or may not be conjugated to a chemical probe
KEEPEGGSRPACGGAGTQGPVQLVKE

SEQ ID NO: 2509 - protein, 20 aa, Homo sapiens
  Table 3 sequence identifier: P07339_C329
  MOD_RES (17)..(17): May or may not be conjugated to a chemical probe
KAIGAVPLIQGEYMIPCEKV

SEQ ID NO: 2510 - protein, 12 aa, Homo sapiens
  Table 3 sequence identifier: Q7Z6Z7_C1401
  MOD_RES (10)..(10): May or may not be conjugated to a chemical probe
RAESPEEVACRK

SEQ ID NO: 2511 - protein, 38 aa, Homo sapiens
  Table 3 sequence identifier: Q16514_C100
  MOD_RES (33)..(33): May or may not be conjugated to a chemical probe
REVDPNEQLDEDVEEMLLQIADDFIESVVTAACQLARH

SEQ ID NO: 2512 - protein, 40 aa, Homo sapiens
  Table 3 sequence identifier: P63151_C239
  MOD_RES (30)..(30): May or may not be conjugated to a chemical probe
RSFNIVDIKPANMEELTEVITAAEFHPNSCNTFVYSSSKG

SEQ ID NO: 2513 - protein, 12 aa, Homo sapiens
  Table 3 sequence identifier: Q7L2H7_C175
  MOD_RES (10)..(10): May or may not be conjugated to a chemical probe
RLLYEALVDCKK

SEQ ID NO: 2514 - protein, 16 aa, Homo sapiens
  Table 3 sequence identifier: Q8NHV4_C66
  MOD_RES (2)..(2): May or may not be conjugated to a chemical probe
KCKPVPLLELAEGQKQ

SEQ ID NO: 2515 - protein, 11 aa, Homo sapiens
  Table 3 sequence identifier: P13010_C339
  MOD_RES (2)..(2): May or may not be conjugated to a chemical probe
KCFSVLGFCKS

SEQ ID NO: 2516 - protein, 44 aa, Homo sapiens
  Table 3 sequence identifier: P51858_C108
  MOD_RES (3)..(3): May or may not be conjugated to a chemical probe
KSCVEEPEPEPEAAEGDGDKKGNAEGSSDEEGKLVIDEPAKEKN

SEQ ID NO: 2517 - protein, 16 aa, Homo sapiens
  Table 3 sequence identifier: P26038_C284
  MOD_RES (6)..(6): May or may not be conjugated to a chemical probe
RILALCMGNHELYMRR

SEQ ID NO: 2518 - protein, 22 aa, Homo sapiens
  Table 3 sequence identifier: P68402_C206
  MOD_RES (3)..(3): May or may not be conjugated to a chemical probe
KICKPLHELIMQLLEETPEEKQ

SEQ ID NO: 2519 - protein, 28 aa, Homo sapiens
  Table 3 sequence identifier: P15407_C97
  MOD_RES (3)..(3): May or may not be conjugated to a chemical probe
RPCEQISPEEEERRRVRRERNKLAAAKC

SEQ ID NO: 2520 - protein, 16 aa, Homo sapiens
  Table 3 sequence identifier: Q12768_C21
  MOD_RES (5)..(5): May or may not be conjugated to a chemical probe
RIVSCGNAIIAELLRL

SEQ ID NO: 2521 - protein, 13 aa, Homo sapiens
  Table 3 sequence identifier: P29144_C28
  MOD_RES (11)..(11): May or may not be conjugated to a chemical probe
KKETGAASFLCRY

SEQ ID NO: 2522 - protein, 24 aa, Homo sapiens
  Table 3 sequence identifier: P78371_C412
  MOD_RES (8)..(8): May or may not be conjugated to a chemical probe
RTVYGGGCSEMLMAHAVTQLANRT

SEQ ID NO: 2523 - protein, 10 aa, Homo sapiens
  Table 3 sequence identifier: O60711_C340
  MOD_RES (2)..(2): May or may not be conjugated to a chemical probe
RCISAMGYKF

SEQ ID NO: 2524 - protein, 11 aa, Homo sapiens
  Table 3 sequence identifier: Q9H9Q2_C110
  MOD_RES (2)..(2): May or may not be conjugated to a chemical probe
KCIPYSVLLKD

SEQ ID NO: 2525 - protein, 40 aa, Homo sapiens
  Table 3 sequence identifier: P40261_C165
  MOD_RES (26)..(26): May or may not be conjugated to a chemical probe
KCDVTQSQPLGAVPLPPADCVLSTLCLDAACPDLPTYCRA

SEQ ID NO: 2526 - protein, 16 aa, Homo sapiens
  Table 3 sequence identifier: Q9BWJ5_C76
  MOD_RES (6)..(6): May or may not be conjugated to a chemical probe
KMLQPCGPPADKPEEN

SEQ ID NO: 2527 - protein, 33 aa, Homo sapiens
  Table 3 sequence identifier: P50479_C44
  MOD_RES (8)..(8): May or may not be conjugated to a chemical probe
KAALAALCPGDLIQAINGESTELMTHLEAQNRI

SEQ ID NO: 2528 - protein, 18 aa, Homo sapiens
  Table 3 sequence identifier: Q5JRX3_C556
  MOD_RES (12)..(12): May or may not be conjugated to a chemical probe
RSQQSKPQDASCLPALKV

SEQ ID NO: 2529 - protein, 18 aa, Homo sapiens
  Table 3 sequence identifier: Q9ULE6_C845
  MOD_RES (7)..(7): May or may not be conjugated to a chemical probe
RWQEQSCSLEPSAPEDLL

SEQ ID NO: 2530 - protein, 19 aa, Homo sapiens
  Table 3 sequence identifier: Q9NXV6_C178
  MOD_RES (12)..(12): May or may not be conjugated to a chemical probe
RASAQQENSSTCIGSAIKS

SEQ ID NO: 2531 - protein, 18 aa, Homo sapiens
  Table 3 sequence identifier: P13639_C67
  MOD_RES (13)..(13): May or may not be conjugated to a chemical probe
RFTDTRKDEQERCITIKS

SEQ ID NO: 2532 - protein, 14 aa, Homo sapiens
  Table 3 sequence identifier: P04183_C79
  MOD_RES (10)..(10): May or may not be conjugated to a chemical probe
RNTMEALPACLLRD

SEQ ID NO: 2533 - protein, 15 aa, Homo sapiens
  Table 3 sequence identifier: Q9H8V3_C221
  MOD_RES (9)..(9): May or may not be conjugated to a chemical probe
KVTHLVANCTQGEKF

SEQ ID NO: 2534 - protein, 21 aa, Homo sapiens
  Table 3 sequence identifier: Q9NPJ6_C162
  MOD_RES (9)..(9): May or may not be conjugated to a chemical probe
RISASNAVCAPLTWVPGDPRR

SEQ ID NO: 2535 - protein, 11 aa, Homo sapiens
  Table 3 sequence identifier: Q5VTR2_C924
  MOD_RES (6)..(6): May or may not be conjugated to a chemical probe
RLTCPCCNMRK

SEQ ID NO: 2536 - protein, 13 aa, Homo sapiens
  Table 3 sequence identifier: O00231_C202
  MOD_RES (9)..(9): May or may not be conjugated to a chemical probe
RTTANAIYCPPKL

SEQ ID NO: 2537 - protein, 10 aa, Homo sapiens
  Table 3 sequence identifier: P50995_C384
  MOD_RES (7)..(7): May or may not be conjugated to a chemical probe
KFNAVLCSRS

SEQ ID NO: 2538 - protein, 10 aa, Homo sapiens
  Table 3 sequence identifier: P62851_C59
  MOD_RES (8)..(8): May or may not be conjugated to a chemical probe
KATYDKLCKE

SEQ ID NO: 2539 - protein, 11 aa, Homo sapiens
  Table 3 sequence identifier: Q12906_C203
  MOD_RES (2)..(2): May or may not be conjugated to a chemical probe
KCLAALASLRH

SEQ ID NO: 2540 - protein, 29 aa, Homo sapiens
  Table 3 sequence identifier: Q13315_C2770
  MOD_RES (8)..(8): May or may not be conjugated to a chemical probe
RSGVLEWCTGTVPIGEFLVNNEDGAHKRY

SEQ ID NO: 2541 - protein, 17 aa, Homo sapiens
  Table 3 sequence identifier: P22681_C508
  MOD_RES (3)..(3): May or may not be conjugated to a chemical probe
RVCVPSSASALGTASKA

SEQ ID NO: 2542 - protein, 18 aa, Homo sapiens
  Table 3 sequence identifier: P35998_C270
  MOD_RES (3)..(3): May or may not be conjugated to a chemical probe
KACLIFFDEIDAIGGARF

SEQ ID NO: 2543 - protein, 31 aa, Homo sapiens
  Table 3 sequence identifier: O75570_C137
  MOD_RES (29)..(29): May or may not be conjugated to a chemical probe
RHAELAPLAAIYQEIQETEQAIEELESMCKS

SEQ ID NO: 2544 - protein, 10 aa, Homo sapiens
  Table 3 sequence identifier: P35579_C1437
  MOD_RES (5)..(5): May or may not be conjugated to a chemical probe
RQSACNLEKK

SEQ ID NO: 2545 - protein, 15 aa, Homo sapiens
  Table 3 sequence identifier: P48643_C493
  MOD_RES (11)..(11): May or may not be conjugated to a chemical probe
KEMNPALGIDCLHKG

SEQ ID NO: 2546 - protein, 28 aa, Homo sapiens
  Table 3 sequence identifier: P52209_C422
  MOD_RES (15)..(15): May or may not be conjugated to a chemical probe
RAVSTGVQAGIPMPCFTTALSFYDGYRH

SEQ ID NO: 2547 - protein, 15 aa, Homo sapiens
  Table 3 sequence identifier: Q13155_C306
  MOD_RES (3)..(3): May or may not be conjugated to a chemical probe
RSCENLAPFNTALKL

SEQ ID NO: 2548 - protein, 9 aa, Homo sapiens
  Table 3 sequence identifier: Q14197_C82
  MOD_RES (7)..(7): May or may not be conjugated to a chemical probe
RLTISYCRS

SEQ ID NO: 2549 - protein, 15 aa, Homo sapiens
  Table 3 sequence identifier: C9J4G0_C66
  MOD_RES (11)..(11): May or may not be conjugated to a chemical probe
RFGDDLNHISCVIKE

SEQ ID NO: 2550 - protein, 37 aa, Homo sapiens
  Table 3 sequence identifier: P00338_C185
  MOD_RES (9)..(9): May or may not be conjugated to a chemical probe
RLGVHPLSCHGWVLGEHGDSSVPVWSGMNVAGVSLKT

SEQ ID NO: 2551 - protein, 15 aa, Homo sapiens
  Table 3 sequence identifier: Q9UBQ0_C41
  MOD_RES (12)..(12): May or may not be conjugated to a chemical probe
KIQHILCTGNLCTKE

SEQ ID NO: 2552 - protein, 21 aa, Homo sapiens
  Table 3 sequence identifier: Q15645_C14
  MOD_RES (6)..(6): May or may not be conjugated to a chemical probe
KQALPCVAESPTVHVEVHQRG

SEQ ID NO: 2553 - protein, 19 aa, Homo sapiens
  Table 3 sequence identifier: Q9H1K1_C69
  MOD_RES (13)..(13): May or may not be conjugated to a chemical probe
KNVGTGLVGAPACGDVMKL

SEQ ID NO: 2554 - protein, 26 aa, Homo sapiens
  Table 3 sequence identifier: P30101_C244
  MOD_RES (11)..(11): May or may not be conjugated to a chemical probe
KFIQENIFGICPHMTEDNKDLIQGKD

SEQ ID NO: 2555 - protein, 31 aa, Homo sapiens
  Table 3 sequence identifier: P09884_C1458
  MOD_RES (27)..(27): May or may not be conjugated to a chemical probe
KLKNTAEQFLSRSGYSEVNLSKLFAGCAVKS

SEQ ID NO: 2556 - protein, 9 aa, Homo sapiens
  Table 3 sequence identifier: Q9NT62_C182
  MOD_RES (7)..(7): May or may not be conjugated to a chemical probe
RKIVEACKA

SEQ ID NO: 2557 - protein, 18 aa, Homo sapiens
  Table 3 sequence identifier: Q7L591_C323
  MOD_RES (13)..(13): May or may not be conjugated to a chemical probe
RERLPELTRPQPCPLPRA

SEQ ID NO: 2558 - protein, 41 aa, Homo sapiens
  Table 3 sequence identifier: Q6IA86_C487
  MOD_RES (20)..(20): May or may not be conjugated to a chemical probe
RNFVENFCAITGQSLNHVLCNQDSDLPEGATVPALGLSNKA

SEQ ID NO: 2559 - protein, 19 aa, Homo sapiens
  Table 3 sequence identifier: P54819_C40
  MOD_RES (7)..(7): May or may not be conjugated to a chemical probe
RLAENFCVCHLATGDMLRA

SEQ ID NO: 2560 - protein, 25 aa, Homo sapiens
  Table 3 sequence identifier: P23610_C110
  MOD_RES (4)..(4): May or may not be conjugated to a chemical probe
RLVCPAAYGEPLQAAASALGAAVRL

SEQ ID NO: 2561 - protein, 22 aa, Homo sapiens
  Table 3 sequence identifier: P13861_C101
  MOD_RES (5)..(5): May or may not be conjugated to a chemical probe
RVSVCAETYNPDEEEEDTDPRV

SEQ ID NO: 2562 - protein, 12 aa, Homo sapiens
  Table 3 sequence identifier: Q96ER3_C366
  MOD_RES (9)..(9): May or may not be conjugated to a chemical probe
RVLQNMEQCQKK

SEQ ID NO: 2563 - protein, 42 aa, Homo sapiens
  Table 3 sequence identifier: Q92597_C272
  MOD_RES (38)..(38): May or may not be conjugated to a chemical probe
RDLEIERPMPGTHTVTLQCPALLVVGDSSPAVDAVVECNSKL

SEQ ID NO: 2564 - protein, 35 aa, Homo sapiens
  Table 3 sequence identifier: Q6P9B6_C13
  MOD_RES (4)..(4): May or may not be conjugated to a chemical probe
RSFCSQFLPEEQAEIDQLFDALSSDKNSPNVSSKS

SEQ ID NO: 2565 - protein, 10 aa, Homo sapiens
  Table 3 sequence identifier: O75663_C14
  MOD_RES (4)..(4): May or may not be conjugated to a chemical probe
RDFCFGPWKL

SEQ ID NO: 2566 - protein, 29 aa, Homo sapiens
  Table 3 sequence identifier: Q05086_C49
  MOD_RES (15)..(15): May or may not be conjugated to a chemical probe
RYYHQLTEGCGNEACTNEFCASCPTFLRM

SEQ ID NO: 2567 - protein, 11 aa, Homo sapiens
  Table 3 sequence identifier: Q14152_C78
  MOD_RES (4)..(4): May or may not be conjugated to a chemical probe
KNICQQVNIKS

SEQ ID NO: 2568 - protein, 29 aa, Homo sapiens
  Table 3 sequence identifier: P63244_C207
  MOD_RES (23)..(23): May or may not be conjugated to a chemical probe
KTNHIGHTGYLNTVTVSPDGSLCASGGKD

SEQ ID NO: 2569 - protein, 41 aa, Homo sapiens
  Table 3 sequence identifier: Q13509_C201
  MOD_RES (28)..(28): May or may not be conjugated to a chemical probe
KVSDTVVEPYNATLSIHQLVENTDETYCIDNEALYDICFRT

SEQ ID NO: 2570 - protein, 34 aa, Homo sapiens
  Table 3 sequence identifier: Q9Y6A5_C502
  MOD_RES (14)..(14): May or may not be conjugated to a chemical probe
RALNSASTSLPTSCPGSEPVPTHQQGQPALELKE

SEQ ID NO: 2571 - protein, 27 aa, Homo sapiens
  Table 3 sequence identifier: Q86W42_C314
  MOD_RES (25)..(25): May or may not be conjugated to a chemical probe
KAQVPGSSPGLLSLSLNQQPAAPECKV

SEQ ID NO: 2572 - protein, 24 aa, Homo sapiens
  Table 3 sequence identifier: Q92878_C157
  MOD_RES (10)..(10): May or may not be conjugated to a chemical probe
KAVLNNVIFCHQEDSNWPLSEGKA

SEQ ID NO: 2573 - protein, 27 aa, Homo sapiens
  Table 3 sequence identifier: O75879_C228
  MOD_RES (17)..(17): May or may not be conjugated to a chemical probe
RAGVGLLEVVLEPDMSCGEEAATAVRE

SEQ ID NO: 2574 - protein, 15 aa, Homo sapiens
  Table 3 sequence identifier: Q9UHB9_C562
  MOD_RES (6)..(6): May or may not be conjugated to a chemical probe
RFETFCLDPSLVTKQ

SEQ ID NO: 2575 - protein, 29 aa, Homo sapiens
  Table 3 sequence identifier: P41250_C155
  MOD_RES (25)..(25): May or may not be conjugated to a chemical probe
RFFYDQAFAIYGGVSGLYDFGPVGCALKN

SEQ ID NO: 2576 - protein, 25 aa, Homo sapiens
  Table 3 sequence identifier: P46821_C1814
  MOD_RES (5)..(5): May or may not be conjugated to a chemical probe
KTATCHSSSSPPIDAASAEPYGFRA

SEQ ID NO: 2577 - protein, 21 aa, Homo sapiens
  Table 3 sequence identifier: O14980_C723
  MOD_RES (2)..(2): May or may not be conjugated to a chemical probe
KCLSENISAAIQANGEMVTKQ

SEQ ID NO: 2578 - protein, 26 aa, Homo sapiens
  Table 3 sequence identifier: P13796_C164
  MOD_RES (24)..(24): May or may not be conjugated to a chemical probe
RHVIPMNPNTNDLFNAVGDGIVLCKM

SEQ ID NO: 2579 - protein, 12 aa, Homo sapiens
  Table 3 sequence identifier: P13796_C336
  MOD_RES (4)..(4): May or may not be conjugated to a chemical probe
RAECMLQQAERL

SEQ ID NO: 2580 - protein, 11 aa, Homo sapiens
  Table 3 sequence identifier: Q9Y2L1_C533
  MOD_RES (8)..(8): May or may not be conjugated to a chemical probe
RGTTVYLCEKR

SEQ ID NO: 2581 - protein, 35 aa, Homo sapiens
  Table 3 sequence identifier: Q9NQW6_C96
  MOD_RES (3)..(3): May or may not be conjugated to a chemical probe
KSCSPSPVSPQVQPQAADTISDSVAVPASLLGMRR

SEQ ID NO: 2582 - protein, 27 aa, Homo sapiens
  Table 3 sequence identifier: P43246_C176
  MOD_RES (5)..(5): May or may not be conjugated to a chemical probe
KLGLCEFPDNDQFSNLEALLIQIGPKE

SEQ ID NO: 2583 - protein, 15 aa, Homo sapiens
  Table 3 sequence identifier: Q9Y4L1_C352
  MOD_RES (8)..(8): May or may not be conjugated to a chemical probe
RVEFEELCADLFERV

SEQ ID NO: 2584 - protein, 16 aa, Homo sapiens
  Table 3 sequence identifier: P15153_C105
  MOD_RES (4)..(4): May or may not be conjugated to a chemical probe
RHHCPSTPIILVGTKL

SEQ ID NO: 2585 - protein, 10 aa, Homo sapiens
  Table 3 sequence identifier: Q9H0G5_C232
  MOD_RES (2)..(2): May or may not be conjugated to a chemical probe
KCILQTDVKV

SEQ ID NO: 2586 - protein, 50 aa, Homo sapiens
  Table 3 sequence identifier: P48507_C194
  MOD_RES (38)..(38): May or may not be conjugated to a chemical probe
KKIVAIGTSDLDKTQLEQLYQWAQVKPNSNQVNLASCCVMPPDLTAFAKQ

SEQ ID NO: 2587 - protein, 12 aa, Homo sapiens
  Table 3 sequence identifier: Q9BRX5_C188
  MOD_RES (8)..(8): May or may not be conjugated to a chemical probe
KGLNDFQCWEKG

SEQ ID NO: 2588 - protein, 32 aa, Homo sapiens
  Table 3 sequence identifier: Q9NR09_C543
  MOD_RES (26)..(26): May or may not be conjugated to a chemical probe
KLQWEIVANVLEDTVKDLEELGANPCLTNSKS

SEQ ID NO: 2589 - protein, 15 aa, Homo sapiens
  Table 3 sequence identifier: Q13813_C1314
  MOD_RES (2)..(2): May or may not be conjugated to a chemical probe
KCTELNQAWSSLGKR

SEQ ID NO: 2590 - protein, 12 aa, Homo sapiens
  Table 3 sequence identifier: Q10713_C466
  MOD_RES (7)..(7): May or may not be conjugated to a chemical probe
KLPHELCTLIRN

SEQ ID NO: 2591 - protein, 37 aa, Homo sapiens
  Table 3 sequence identifier: Q9H7N4_C1098
  MOD_RES (22)..(22): May or may not be conjugated to a chemical probe
RVSQLPTLPPPMPWNLPAGVDCTTSGVLALTALLFKM

SEQ ID NO: 2592 - protein, 25 aa, Homo sapiens
  Table 3 sequence identifier: Q9NXA8_C303
  MOD_RES (18)..(18): May or may not be conjugated to a chemical probe
RFHFQGPCGTTLPEALACHENETVS

SEQ ID NO: 2593 - protein, 33 aa, Homo sapiens
  Table 3 sequence identifier: P83916_C60
  MOD_RES (20)..(20): May or may not be conjugated to a chemical probe
KWKGFSDEDNTWEPEENLDCPDLIAEFLQSQKT

SEQ ID NO: 2594 - protein, 13 aa, Homo sapiens
  Table 3 sequence identifier: O00410_C110
  MOD_RES (4)..(4): May or may not be conjugated to a chemical probe
KKVCDIAAELARN

SEQ ID NO: 2595 - protein, 49 aa, Homo sapiens
  Table 3 sequence identifier: P57764_C457
  MOD_RES (40)..(40): May or may not be conjugated to a chemical probe
RSTMSLPPGLLGNSWGEGAPAWVLLDECGLELGEDTPHVCWEPQAQGRM

SEQ ID NO: 2596 - protein, 10 aa, Homo sapiens
  Table 3 sequence identifier: P15170_C327
  MOD_RES (8)..(8): May or may not be conjugated to a chemical probe
KLESGSICKG

SEQ ID NO: 2597 - protein, 22 aa, Homo sapiens
  Table 3 sequence identifier: Q9BWD1_C360
  MOD_RES (20)..(20): May or may not be conjugated to a chemical probe
KVNIEGGAIALGHPLGASGCRI

SEQ ID NO: 2598 - protein, 11 aa, Homo sapiens
  Table 3 sequence identifier: P04818_C180
  MOD_RES (5)..(5): May or may not be conjugated to a chemical probe
RIIMCAWNPRD

SEQ ID NO: 2599 - protein, 30 aa, Homo sapiens
  Table 3 sequence identifier: Q9BQ69_C276
  MOD_RES (17)..(17): May or may not be conjugated to a chemical probe
RSVAFPCISTGVFGYPCEAAAEIVLATLRE

SEQ ID NO: 2600 - protein, 40 aa, Homo sapiens
  Table 3 sequence identifier: Q01970_C834
  MOD_RES (9)..(9): May or may not be conjugated to a chemical probe
RNEANQPLCLPALLIYTEASDYIPDDHQDYAEALINPIKH

SEQ ID NO: 2601 - protein, 17 aa, Homo sapiens
  Table 3 sequence identifier: Q9Y6E0_C394
  MOD_RES (5)..(5): May or may not be conjugated to a chemical probe
KSQACGGNLGSIEELRG

SEQ ID NO: 2602 - protein, 10 aa, Homo sapiens
  Table 3 sequence identifier: P53634_C136
  MOD_RES (5)..(5): May or may not be conjugated to a chemical probe
RNWACFTGKK

SEQ ID NO: 2603 - protein, 22 aa, Homo sapiens
  Table 3 sequence identifier: Q9UGP4_C431
  MOD_RES (4)..(4): May or may not be conjugated to a chemical probe
RLPCQPLVPGPELRPSAAELKL

SEQ ID NO: 2604 - protein, 19 aa, Homo sapiens
  Table 3 sequence identifier: O75369_C455
  MOD_RES (17)..(17): May or may not be conjugated to a chemical probe
KSPFVVQVGEACNPNACRA

SEQ ID NO: 2605 - protein, 14 aa, Homo sapiens
  Table 3 sequence identifier: P21980_C554
  MOD_RES (5)..(5): May or may not be conjugated to a chemical probe
KYRDCLTESNLIKV

SEQ ID NO: 2606 - protein, 11 aa, Homo sapiens
  Table 3 sequence identifier: P30281_C47
  MOD_RES (7)..(7): May or may not be conjugated to a chemical probe
RASYFQCVQRE

SEQ ID NO: 2607 - protein, 16 aa, Homo sapiens
  Table 3 sequence identifier: P49790_C1129
  MOD_RES (2)..(2): May or may not be conjugated to a chemical probe
KCQPVFSFGNSEQTKD

SEQ ID NO: 2608 - protein, 14 aa, Homo sapiens
  Table 3 sequence identifier: Q93008_C673
  MOD_RES (8)..(8): May or may not be conjugated to a chemical probe
KDGQLWLCAPQAKQ

SEQ ID NO: 2609 - protein, 21 aa, Homo sapiens
  Table 3 sequence identifier: Q9Y613_C31
  MOD_RES (13)..(13): May or may not be conjugated to a chemical probe
RVQYLEDTDPFACANFPEPRR

SEQ ID NO: 2610 - protein, 21 aa, Homo sapiens
  Table 3 sequence identifier: Q9BXB5_C203
  MOD_RES (17)..(17): May or may not be conjugated to a chemical probe
RSLTLLPHGTPNSASPCSQRH

SEQ ID NO: 2611 - protein, 17 aa, Homo sapiens
  Table 3 sequence identifier: P62633_C97
  MOD_RES (4)..(4): May or may not be conjugated to a chemical probe
REQCCYNCGKPGHLARD

SEQ ID NO: 2612 - protein, 21 aa, Homo sapiens
  Table 3 sequence identifier: Q14005_C1016
  MOD_RES (17)..(17): May or may not be conjugated to a chemical probe
KSLLCLPSSISCAQTPCIPKE

SEQ ID NO: 2613 - protein, 22 aa, Homo sapiens
  Table 3 sequence identifier: Q9UPQ0_C863
  MOD_RES (17)..(17): May or may not be conjugated to a chemical probe
IDLGNCQDEKKIDLGNCQDEKQ

SEQ ID NO: 2614 - protein, 19 aa, Homo sapiens
  Table 3 sequence identifier: Q9HD26_C408
  MOD_RES (17)..(17): May or may not be conjugated to a chemical probe
RLYLDELEGGGNPGASCKD

SEQ ID NO: 2615 - protein, 21 aa, Homo sapiens
  Table 3 sequence identifier: P07900_C481
  MOD_RES (18)..(18): May or may not be conjugated to a chemical probe
RYYTSASGDEMVSLKDYCTRM

SEQ ID NO: 2616 - protein, 18 aa, Homo sapiens
  Table 3 sequence identifier: P21333_C717
  MOD_RES (10)..(10): May or may not be conjugated to a chemical probe
RVQVQDNEGCPVEALVKD

SEQ ID NO: 2617 - protein, 11 aa, Homo sapiens
  Table 3 sequence identifier: P21333_C2582
  MOD_RES (8)..(8): May or may not be conjugated to a chemical probe
KSSFTVDCSKA

SEQ ID NO: 2618 - protein, 8 aa, Homo sapiens
  Table 3 sequence identifier: P13010_C235
  MOD_RES (4)..(4): May or may not be conjugated to a chemical probe
RKLCVFKK

SEQ ID NO: 2619 - protein, 22 aa, Homo sapiens
  Table 3 sequence identifier: O95347_C46
  MOD_RES (9)..(9): May or may not be conjugated to a chemical probe
KSNILDSICFLLGISNLSQVRA

SEQ ID NO: 2620 - protein, 40 aa, Homo sapiens
  Table 3 sequence identifier: P68402_C188
  MOD_RES (23)..(23): May or may not be conjugated to a chemical probe
KLANVQLLDTDGGFVHSDGAISCHDMFDFLHLTGGGYAKI

SEQ ID NO: 2621 - protein, 10 aa, Homo sapiens
  Table 3 sequence identifier: P61962_C256
  MOD_RES (4)..(4): May or may not be conjugated to a chemical probe
RVPCTPVARL

SEQ ID NO: 2622 - protein, 17 aa, Homo sapiens
  Table 3 sequence identifier: P49327_C1118
  MOD_RES (3)..(3): May or may not be conjugated to a chemical probe
KFCFTPHTEEGCLSERA

SEQ ID NO: 2623 - protein, 20 aa, Homo sapiens
  Table 3 sequence identifier: P49321_C84
  MOD_RES (10)..(10): May or may not be conjugated to a chemical probe
KKYGETANECGEAFFFYGKS

SEQ ID NO: 2624 - protein, 29 aa, Homo sapiens
  Table 3 sequence identifier: Q14019_C52
  MOD_RES (23)..(23): May or may not be conjugated to a chemical probe
KYDGSTIVPGEQGAEYQHFIQQCTDDVRL

SEQ ID NO: 2625 - protein, 9 aa, Homo sapiens
  Table 3 sequence identifier: Q9NYK5_C335
  MOD_RES (6)..(6): May or may not be conjugated to a chemical probe
KATEECTST

SEQ ID NO: 2626 - protein, 16 aa, Homo sapiens
  Table 3 sequence identifier: P55160_C338
  MOD_RES (13)..(13): May or may not be conjugated to a chemical probe
KEHVIANSGQFHCQRR

SEQ ID NO: 2627 - protein, 26 aa, Homo sapiens
  Table 3 sequence identifier: P10599_C69
  MOD_RES (22)..(22): May or may not be conjugated to a chemical probe
KYSNVIFLEVDVDDCQDVASECEVKC

SEQ ID NO: 2628 - protein, 26 aa, Homo sapiens
  Table 3 sequence identifier: P14921_C31
  MOD_RES (14)..(14): May or may not be conjugated to a chemical probe
KVDLELFPSPDMECADVPLLTPSSKE

SEQ ID NO: 2629 - protein, 16 aa, Homo sapiens
  Table 3 sequence identifier: Q8NBJ5_C412
  MOD_RES (6)..(6): May or may not be conjugated to a chemical probe
KGELGCFLSHYNIWKE

SEQ ID NO: 2630 - protein, 17 aa, Homo sapiens
  Table 3 sequence identifier: Q13200_C448
  MOD_RES (8)..(8): May or may not be conjugated to a chemical probe
KSGALLACGIVNSGVRN

SEQ ID NO: 2631 - protein, 15 aa, Homo sapiens
  Table 3 sequence identifier: Q9ULW0_C364
  MOD_RES (3)..(3): May or may not be conjugated to a chemical probe
KICRDPQTPVLQTKH

SEQ ID NO: 2632 - protein, 18 aa, Homo sapiens
  Table 3 sequence identifier: P09914_C138
  MOD_RES (4)..(4): May or may not be conjugated to a chemical probe
RMECPEIDCEEGWALLKC

SEQ ID NO: 2633 - protein, 32 aa, Homo sapiens
  Table 3 sequence identifier: O14744_C449
  MOD_RES (22)..(22): May or may not be conjugated to a chemical probe
KADIIVSELLGSFADNELSPECLDGAQHFLKD

SEQ ID NO: 2634 - protein, 20 aa, Homo sapiens
  Table 3 sequence identifier: Q6NXT1_C230
  MOD_RES (14)..(14): May or may not be conjugated to a chemical probe
KSKLNILQEGHAQCLEAVRL

SEQ ID NO: 2635 - protein, 37 aa, Homo sapiens
  Table 3 sequence identifier: Q5VT52_C649
  MOD_RES (27)..(27): May or may not be conjugated to a chemical probe
KLPSNSLGFTATHNTSPAAPPTEVTICQSSEVSKPKL

SEQ ID NO: 2636 - protein, 36 aa, Homo sapiens
  Table 3 sequence identifier: P22314_C200
  MOD_RES (9)..(9): May or may not be conjugated to a chemical probe
RGLFGQLFCDFGEEMILTDSNGEQPLSAMVSMVTKD

SEQ ID NO: 2637 - protein, 22 aa, Homo sapiens
  Table 3 sequence identifier: P22314_C431
  MOD_RES (16)..(16): May or may not be conjugated to a chemical probe
KFMPIMQWLYFDALECLPEDKE

SEQ ID NO: 2638 - protein, 23 aa, Homo sapiens
  Table 3 sequence identifier: Q8IU81_C280
  MOD_RES (8)..(8): May or may not be conjugated to a chemical probe
KLFTEYPCGSGNVYAGVLAVARQ

SEQ ID NO: 2639 - protein, 11 aa, Homo sapiens
  Table 3 sequence identifier: Q5T160_C576
  MOD_RES (9)..(9): May or may not be conjugated to a chemical probe
KLLGITPVCRM

SEQ ID NO: 2640 - protein, 25 aa, Homo sapiens
  Table 3 sequence identifier: Q86UV5_C986
  MOD_RES (7)..(7): May or may not be conjugated to a chemical probe
KILSDDCATLGTLGVIPESVILLKA

SEQ ID NO: 2641 - protein, 10 aa, Homo sapiens
  Table 3 sequence identifier: P04083_C343
  MOD_RES (7)..(7): May or may not be conjugated to a chemical probe
KILVALCGGN

SEQ ID NO: 2642 - protein, 23 aa, Homo sapiens
  Table 3 sequence identifier: Q8NFF5_C236
  MOD_RES (9)..(9): May or may not be conjugated to a chemical probe
RLHYGTDPCTGQPFRFPLVSVRN

SEQ ID NO: 2643 - protein, 22 aa, Homo sapiens
  Table 3 sequence identifier: P04150_C367
  MOD_RES (2)..(2): May or may not be conjugated to a chemical probe
RCQGSGDDNLTSLGTLNFPGRT

SEQ ID NO: 2644 - protein, 11 aa, Homo sapiens
  Table 3 sequence identifier: Q9H269_C490
  MOD_RES (8)..(8): May or may not be conjugated to a chemical probe
RILAHWACYKV

SEQ ID NO: 2645 - protein, 29 aa, Homo sapiens
  Table 3 sequence identifier: Q969Z0_C417
  MOD_RES (22)..(22): May or may not be conjugated to a chemical probe
KLGSELPGLEPALQVDLVWALCVLQQARE

SEQ ID NO: 2646 - protein, 21 aa, Homo sapiens
  Table 3 sequence identifier: Q9ULC4_C113
  MOD_RES (11)..(11): May or may not be conjugated to a chemical probe
KFVLSGANIMCPGLTSPGAKL

SEQ ID NO: 2647 - protein, 21 aa, Homo sapiens
  Table 3 sequence identifier: Q15306_C343
  MOD_RES (11)..(11): May or may not be conjugated to a chemical probe
RIYWDGPLALCNDRPNKLERD

SEQ ID NO: 2648 - protein, 23 aa, Homo sapiens
  Table 3 sequence identifier: Q15013_C124
  MOD_RES (2)..(2): May or may not be conjugated to a chemical probe
KCQQALAELESVLSHLEDFFART

SEQ ID NO: 2649 - protein, 31 aa, Homo sapiens
  Table 3 sequence identifier: P45974_C532
  MOD_RES (9)..(9): May or may not be conjugated to a chemical probe
RAQVPFSSCLEAYGAPEQVDDFWSTALQAKS

SEQ ID NO: 2650 - protein, 25 aa, Homo sapiens
  Table 3 sequence identifier: O95817_C179
  MOD_RES (10)..(10): May or may not be conjugated to a chemical probe
RSQSPAASDCSSSSSSASLPSSGRS

SEQ ID NO: 2651 - protein, 28 aa, Homo sapiens
  Table 3 sequence identifier: Q99797_C687
  MOD_RES (2)..(2): May or may not be conjugated to a chemical probe
KCPSVDDFVSALVSDLDLDFETFLMDSE

SEQ ID NO: 2652 - protein, 23 aa, Homo sapiens
  Table 3 sequence identifier: P35579_C896
  MOD_RES (15)..(15): May or may not be conjugated to a chemical probe
KLQLQEQLQAETELCAEAEELRA

SEQ ID NO: 2653 - protein, 17 aa, Homo sapiens
  Table 3 sequence identifier: O94855_C853
  MOD_RES (3)..(3): May or may not be conjugated to a chemical probe
KNCVLLSRPEISTDERA

SEQ ID NO: 2654 - protein, 23 aa, Homo sapiens
  Table 3 sequence identifier: O14965_C393
  MOD_RES (19)..(19): May or may not be conjugated to a chemical probe
REVLEHPWITANSSKPSNCQNKE

SEQ ID NO: 2655 - protein, 32 aa, Homo sapiens
  Table 3 sequence identifier: Q9BQA1_C65
  MOD_RES (4)..(4): May or may not be conjugated to a chemical probe
KDPCAAPNEGFCSAGVQTEAGVADLTWVGERG

SEQ ID NO: 2656 - protein, 27 aa, Homo sapiens
  Table 3 sequence identifier: Q27J81_C284
  MOD_RES (4)..(4): May or may not be conjugated to a chemical probe
KVSCSPVSAQLLSVLQGLLHLEPTLRS

SEQ ID NO: 2657 - protein, 27 aa, Homo sapiens
  Table 3 sequence identifier: P30048_C108
  MOD_RES (16)..(16): May or may not be conjugated to a chemical probe
KYLVLFFYPLDFTFVCPTEIVAFSDKA

SEQ ID NO: 2658 - protein, 29 aa, Homo sapiens
  Table 3 sequence identifier: P22102_C646
  MOD_RES (14)..(14): May or may not be conjugated to a chemical probe
KSSLQYSSPAPDGCGDQTLGDLLLTPTRI

SEQ ID NO: 2659 - protein, 12 aa, Homo sapiens
  Table 3 sequence identifier: P62316_C63
  MOD_RES (3)..(3): May or may not be conjugated to a chemical probe
RHCNMVLENVKE

SEQ ID NO: 2660 - protein, 12 aa, Homo sapiens
  Table 3 sequence identifier: P09884_C141
  MOD_RES (7)..(7): May or may not be conjugated to a chemical probe
KSMFIACAGKKT

SEQ ID NO: 2661 - protein, 9 aa, Homo sapiens
  Table 3 sequence identifier: Q7L591_C493
  MOD_RES (6)..(6): May or may not be conjugated to a chemical probe
KGPAPCDRP

SEQ ID NO: 2662 - protein, 16 aa, Homo sapiens
  Table 3 sequence identifier: O00159_C161
  MOD_RES (10)..(10): May or may not be conjugated to a chemical probe
RLLQFYAETCPAPERG

SEQ ID NO: 2663 - protein, 14 aa, Homo sapiens
  Table 3 sequence identifier: O00151_C73
  MOD_RES (3)..(3): May or may not be conjugated to a chemical probe
KGCTDNLTLTVARS

SEQ ID NO: 2664 - protein, 13 aa, Homo sapiens
  Table 3 sequence identifier: O00151_C263
  MOD_RES (2)..(2): May or may not be conjugated to a chemical probe
KCGTGIVGVFVKL

SEQ ID NO: 2665 - protein, 22 aa, Homo sapiens
  Table 3 sequence identifier: P62136_C171
  MOD_RES (4)..(4): May or may not be conjugated to a chemical probe
KIFCCHGGLSPDLQSMEQIRRI

SEQ ID NO: 2666 - protein, 17 aa, Homo sapiens
  Table 3 sequence identifier: P55060_C853
  MOD_RES (6)..(6): May or may not be conjugated to a chemical probe
KLLTECPPMMDTEYTKL

SEQ ID NO: 2667 - protein, 10 aa, Homo sapiens
  Table 3 sequence identifier: O95232_C58
  MOD_RES (7)..(7): May or may not be conjugated to a chemical probe
RSDLGPCEKI

SEQ ID NO: 2668 - protein, 18 aa, Homo sapiens
  Table 3 sequence identifier: P29590_C338
  MOD_RES (2)..(2): May or may not be conjugated to a chemical probe
KCYASDQEVLDMHGFLRQ

SEQ ID NO: 2669 - protein, 9 aa, Homo sapiens
  Table 3 sequence identifier: Q8IXK0_C673
  MOD_RES (6)..(6): May or may not be conjugated to a chemical probe
RYNVGCTKR

SEQ ID NO: 2670 - protein, 34 aa, Homo sapiens
  Table 3 sequence identifier: Q14980_C1729
  MOD_RES (22)..(22): May or may not be conjugated to a chemical probe
KSREPQAKPQLDLSIDSLDLSCEEGTPLSITSKL

SEQ ID NO: 2671 - protein, 30 aa, Homo sapiens
  Table 3 sequence identifier: P63244_C286
  MOD_RES (7)..(7): May or may not be conjugated to a chemical probe
KAEPPQCTSLAWSADGQTLFAGYTDNLVRV

SEQ ID NO: 2672 - protein, 13 aa, Homo sapiens
  Table 3 sequence identifier: P62333_C347
  MOD_RES (3)..(3): May or may not be conjugated to a chemical probe
NVCTEAGMFAIRA

SEQ ID NO: 2673 - protein, 14 aa, Homo sapiens
  Table 3 sequence identifier: Q13501_C113
  MOD_RES (7)..(7): May or may not be conjugated to a chemical probe
RDHRPPCAQEAPRN

SEQ ID NO: 2674 - protein, 9 aa, Homo sapiens
  Table 3 sequence identifier: P60866_C36
  MOD_RES (3)..(3): May or may not be conjugated to a chemical probe
KVCADLIRG

SEQ ID NO: 2675 - protein, 31 aa, Homo sapiens
  Table 3 sequence identifier: Q969E8_C17
  MOD_RES (5)..(5): May or may not be conjugated to a chemical probe
RAGVCAALEAWPALQIAVENGFGGVHSQEKA

SEQ ID NO: 2676 - protein, 44 aa, Homo sapiens
  Table 3 sequence identifier: Q93052_C262
  MOD_RES (37)..(37): May or may not be conjugated to a chemical probe
KSAQPSPHYMAAPSSGQIYGSGPQGYNTQPVPVSGQCPPPSTRG

SEQ ID NO: 2677 - protein, 11 aa, Homo sapiens
  Table 3 sequence identifier: P08758_C316
  MOD_RES (7)..(7): May or may not be conjugated to a chemical probe
KALLLLCGEDD

SEQ ID NO: 2678 - protein, 12 aa, Homo sapiens
  Table 3 sequence identifier: O75616_C150
  MOD_RES (2)..(2): May or may not be conjugated to a chemical probe
RCQALGVITEKE

SEQ ID NO: 2679 - protein, 27 aa, Homo sapiens
  Table 3 sequence identifier: Q9UHB9_C525
  MOD_RES (2)..(2): May or may not be conjugated to a chemical probe
KCSLQAAAILDANDAHQTETSSSQVKD

SEQ ID NO: 2680 - protein, 16 aa, Homo sapiens
  Table 3 sequence identifier: Q9H223_C175
  MOD_RES (6)..(6): May or may not be conjugated to a chemical probe
RGYDFCQVLQWFAERV

SEQ ID NO: 2681 - protein, 33 aa, Homo sapiens
  Table 3 sequence identifier: P08107_C603
  MOD_RES (7)..(7): May or may not be conjugated to a chemical probe
KELEQVCNPIISGLYQGAGGPGPGGFGAQGPKG

SEQ ID NO: 2682 - protein, 11 aa, Homo sapiens
  Table 3 sequence identifier: P27708_C183
  MOD_RES (7)..(7): May or may not be conjugated to a chemical probe
RILALDCGLKY

SEQ ID NO: 2683 - protein, 10 aa, Homo sapiens
  Table 3 sequence identifier: Q9Y4L1_C805
  MOD_RES (3)..(3): May or may not be conjugated to a chemical probe
KLCQGLFFRV

SEQ ID NO: 2684 - protein, 16 aa, Homo sapiens
  Table 3 sequence identifier: P26358_C1125
  MOD_RES (5)..(5): May or may not be conjugated to a chemical probe
KSQACEPSEPEIEIKL

SEQ ID NO: 2685 - protein, 19 aa, Homo sapiens
  Table 3 sequence identifier: P36954_C52
  MOD_RES (13)..(13): May or may not be conjugated to a chemical probe
RNCDYQQEADNSCIYVNKI

SEQ ID NO: 2686 - protein, 27 aa, Homo sapiens
  Table 3 sequence identifier: P49748_C156
  MOD_RES (20)..(20): May or may not be conjugated to a chemical probe
KELGAFGLQVPSELGGVGLCNTQYARL

SEQ ID NO: 2687 - protein, 17 aa, Homo sapiens
  Table 3 sequence identifier: Q9H2G2_C1212
  MOD_RES (8)..(8): May or may not be conjugated to a chemical probe
KMTGESECLNPSTQSRI

SEQ ID NO: 2688 - protein, 28 aa, Homo sapiens
  Table 3 sequence identifier: P35268_C25
  MOD_RES (6)..(6): May or may not be conjugated to a chemical probe
KFTLDCTHPVEDGIMDAANFEQFLQERI

SEQ ID NO: 2689 - protein, 21 aa, Homo sapiens
  Table 3 sequence identifier: P46939_C539
  MOD_RES (17)..(17): May or may not be conjugated to a chemical probe
RLQEINILWQELLEEQCLLKA

SEQ ID NO: 2690 - protein, 16 aa, Homo sapiens
  Table 3 sequence identifier: P49368_C173
  MOD_RES (7)..(7): May or may not be conjugated to a chemical probe
RWSSLACNIALDAVKM

SEQ ID NO: 2691 - protein, 26 aa, Homo sapiens
  Table 3 sequence identifier: P50135_C82
  MOD_RES (10)..(10): May or may not be conjugated to a chemical probe
KVQAQYPGVCINNEVVEPSAEQIAKY

SEQ ID NO: 2692 - protein, 31 aa, Homo sapiens
  Table 3 sequence identifier: Q6Y7W6_C938
  MOD_RES (17)..(17): May or may not be conjugated to a chemical probe
KLPSSSTWGQQSNTTACQSQATLSLAEIQKL

SEQ ID NO: 2693 - protein, 14 aa, Homo sapiens
  Table 3 sequence identifier: O95861_C59
  MOD_RES (8)..(8): May or may not be conjugated to a chemical probe
RLAQMSICSSLARK

SEQ ID NO: 2694 - protein, 10 aa, Homo sapiens
  Table 3 sequence identifier: P49023_C290
  MOD_RES (2)..(2): May or may not be conjugated to a chemical probe
RCWAAGWPRD

SEQ ID NO: 2695 - protein, 18 aa, Homo sapiens
  Table 3 sequence identifier: Q99873_C216
  MOD_RES (15)..(15): May or may not be conjugated to a chemical probe
KIHWWENVYGFDMSCIKD

SEQ ID NO: 2696 - protein, 15 aa, Homo sapiens
  Table 3 sequence identifier: P02765_C132
  MOD_RES (2)..(2): May or may not be conjugated to a chemical probe
KCDSSPDSAEDVRKV

SEQ ID NO: 2697 - protein, 13 aa, Homo sapiens
  Table 3 sequence identifier: Q9H3M7_C120
  MOD_RES (6)..(6): May or may not be conjugated to a chemical probe
KGKYGCVDYWVKA

SEQ ID NO: 2698 - protein, 9 aa, Homo sapiens
  Table 3 sequence identifier: Q9UPN3_C4825
  MOD_RES (3)..(3): May or may not be conjugated to a chemical probe
KNCPISAKL

SEQ ID NO: 2699 - protein, 13 aa, Homo sapiens
  Table 3 sequence identifier: Q9UPN9_C150
  MOD_RES (10)..(10): May or may not be conjugated to a chemical probe
KLLPCLHSFCLRC

SEQ ID NO: 2700 - protein, 32 aa, Homo sapiens
  Table 3 sequence identifier: O75369_C1158
  MOD_RES (12)..(12): May or may not be conjugated to a chemical probe
KVGEAGLLSVDCSEAGPGALGLEAVSDSGTKA

SEQ ID NO: 2701 - protein, 35 aa, Homo sapiens
  Table 3 sequence identifier: P56545_C140
  MOD_RES (27)..(27): May or may not be conjugated to a chemical probe
KAAGELGIAVCNIPSAAVEETADSTICHILNLYRR

SEQ ID NO: 2702 - protein, 12 aa, Homo sapiens
  Table 3 sequence identifier: Q00341_C948
  MOD_RES (3)..(3): May or may not be conjugated to a chemical probe
RRCDIIIISGRK

SEQ ID NO: 2703 - protein, 20 aa, Homo sapiens
  Table 3 sequence identifier: P35250_C171
  MOD_RES (6)..(6): May or may not be conjugated to a chemical probe
RFALACNASDKIIEPIQSRC

SEQ ID NO: 2704 - protein, 14 aa, Homo sapiens
  Table 3 sequence identifier: P46013_C1285
  MOD_RES (12)..(12): May or may not be conjugated to a chemical probe
RKADVEGELLACRN

SEQ ID NO: 2705 - protein, 10 aa, Homo sapiens
  Table 3 sequence identifier: O75083_C225
  MOD_RES (3)..(3): May or may not be conjugated to a chemical probe
KVCALGGSKA

SEQ ID NO: 2706 - protein, 27 aa, Homo sapiens
  Table 3 sequence identifier: O43252_C165
  MOD_RES (23)..(23): May or may not be conjugated to a chemical probe
RQIHEGASLPFFEVFVDAPLHVCEQRD

SEQ ID NO: 2707 - protein, 28 aa, Homo sapiens
  Table 3 sequence identifier: Q16512_C317
  MOD_RES (15)..(15): May or may not be conjugated to a chemical probe
RLAGPFPATHYSTLCKPAPLTGTLEVRV

SEQ ID NO: 2708 - protein, 28 aa, Homo sapiens
  Table 3 sequence identifier: Q16881_C339
  MOD_RES (24)..(24): May or may not be conjugated to a chemical probe
RYLGIPGDKEYCISSDDLFSLPYCPGKT

SEQ ID NO: 2709 - protein, 19 aa, Homo sapiens
  Table 3 sequence identifier: P21333_C478
  MOD_RES (12)..(12): May or may not be conjugated to a chemical probe
RSPYTVTVGQACNPSACRA

SEQ ID NO: 2710 - protein, 26 aa, Homo sapiens
  Table 3 sequence identifier: P21333_C2378
  MOD_RES (12)..(12): May or may not be conjugated to a chemical probe
KVHSPSGALEECYVTEIDQDKYAVRF

SEQ ID NO: 2711 - protein, 17 aa, Homo sapiens
  Table 3 sequence identifier: O00268_C867
  MOD_RES (3)..(3): May or may not be conjugated to a chemical probe
RSCKDETFLLQAPLQRR

SEQ ID NO: 2712 - protein, 21 aa, Homo sapiens
  Table 3 sequence identifier: O95340_C117
  MOD_RES (10)..(10): May or may not be conjugated to a chemical probe
KLFADAGLVCITSFISPFAKD

SEQ ID NO: 2713 - protein, 23 aa, Homo sapiens
  Table 3 sequence identifier: P42765_C382
  MOD_RES (8)..(8): May or may not be conjugated to a chemical probe
KYAVGSACIGGGQGIAVIIQSTA

SEQ ID NO: 2714 - protein, 13 aa, Homo sapiens
  Table 3 sequence identifier: Q9UI12_C85
  MOD_RES (11)..(11): May or may not be conjugated to a chemical probe
KTFINLMTHICKE

SEQ ID NO: 2715 - protein, 17 aa, Homo sapiens
  Table 3 sequence identifier: Q05655_C127
  MOD_RES (15)..(15): May or may not be conjugated to a chemical probe
KVLMSVQYFLEDVDCKQ

SEQ ID NO: 2716 - protein, 19 aa, Homo sapiens
  Table 3 sequence identifier: P42166_C629
  MOD_RES (10)..(10): May or may not be conjugated to a chemical probe
KTYDAASYICEAAFDEVKM

SEQ ID NO: 2717 - protein, 11 aa, Homo sapiens
  Table 3 sequence identifier: O14929_C27
  MOD_RES (2)..(2): May or may not be conjugated to a chemical probe
KCNTNTAIELK

SEQ ID NO: 2718 - protein, 11 aa, Homo sapiens
  Table 3 sequence identifier: Q9NYK5_C133
  MOD_RES (3)..(3): May or may not be conjugated to a chemical probe
KDCDPGEVNKA

SEQ ID NO: 2719 - protein, 29 aa, Homo sapiens
  Table 3 sequence identifier: O60234_C96
  MOD_RES (16)..(16): May or may not be conjugated to a chemical probe
RVSYPLCFIFSSPVGCKPEQQMMYAGSKN

SEQ ID NO: 2720 - protein, 14 aa, Homo sapiens
  Table 3 sequence identifier: F8VZW7_C74
  MOD_RES (5)..(5): May or may not be conjugated to a chemical probe
KLHYCVSCAIHSKV

SEQ ID NO: 2721 - protein, 14 aa, Homo sapiens
  Table 3 sequence identifier: Q12888_C1040
  MOD_RES (10)..(10): May or may not be conjugated to a chemical probe
KTMSVLSCICEARQ

SEQ ID NO: 2722 - protein, 21 aa, Homo sapiens
  Table 3 sequence identifier: Q5JTZ9_C609
  MOD_RES (18)..(18): May or may not be conjugated to a chemical probe
RAQVCGGFILHEAVAPECLRL

SEQ ID NO: 2723 - protein, 18 aa, Homo sapiens
  Table 3 sequence identifier: Q9Y383_C44
  MOD_RES (8)..(8): May or may not be conjugated to a chemical probe
KSHLLNCCPHDVLSGTRM

SEQ ID NO: 2724 - protein, 29 aa, Homo sapiens
  Table 3 sequence identifier: Q6P1R3_C99
  MOD_RES (27)..(27): May or may not be conjugated to a chemical probe
RSAASSSVSFSPGGGGGGAAAAAAAACRG

SEQ ID NO: 2725 - protein, 11 aa, Homo sapiens
  Table 3 sequence identifier: Q99832_C364
  MOD_RES (8)..(8): May or may not be conjugated to a chemical probe
RYNFFTGCPKA

SEQ ID NO: 2726 - protein, 13 aa, Homo sapiens
  Table 3 sequence identifier: Q9NRW4_C124
  MOD_RES (3)..(3): May or may not be conjugated to a chemical probe
RSCANPNVGFQRQ

SEQ ID NO: 2727 - protein, 22 aa, Homo sapiens
  Table 3 sequence identifier: Q8N163_C238
  MOD_RES (14)..(14): May or may not be conjugated to a chemical probe
RVHLTPYTVDSPICDFLELQRR

SEQ ID NO: 2728 - protein, 30 aa, Homo sapiens
  Table 3 sequence identifier: Q8N163_C443
  MOD_RES (26)..(26): May or may not be conjugated to a chemical probe
RLQTVVVYLPDVWTIMPTLEEWEALCQQKA

SEQ ID NO: 2729 - protein, 11 aa, Homo sapiens
  Table 3 sequence identifier: Q15149_C1136
  MOD_RES (7)..(7): May or may not be conjugated to a chemical probe
RLQLEACETRT

SEQ ID NO: 2730 - protein, 30 aa, Homo sapiens
  Table 3 sequence identifier: Q15149_C4454
  MOD_RES (8)..(8): May or may not be conjugated to a chemical probe
RLLEAQACTGGIIDPSTGERFPVTDAVNKG

SEQ ID NO: 2731 - protein, 36 aa, Homo sapiens
  Table 3 sequence identifier: P31146_C285
  MOD_RES (33)..(33): May or may not be conjugated to a chemical probe
KHLEEPLSLQELDTSSGVLLPFFDPDTNIVYLCGKG

SEQ ID NO: 2732 - protein, 18 aa, Homo sapiens
  Table 3 sequence identifier: Q16555_C248
  MOD_RES (11)..(11): May or may not be conjugated to a chemical probe
RAITIANQTNCPLYITKV

SEQ ID NO: 2733 - protein, 10 aa, Homo sapiens
  Table 3 sequence identifier: Q99567_C713
  MOD_RES (3)..(3): May or may not be conjugated to a chemical probe
RKCIQSILKE

SEQ ID NO: 2734 - protein, 29 aa, Homo sapiens
  Table 3 sequence identifier: P21964_C119
  MOD_RES (22)..(22): May or may not be conjugated to a chemical probe
KIVDAVIQEHQPSVLLELGAYCGYSAVRM

SEQ ID NO: 2735 - protein, 13 aa, Homo sapiens
  Table 3 sequence identifier: P62857_C27
  MOD_RES (8)..(8): May or may not be conjugated to a chemical probe
RTGSQGQCTQVRV

SEQ ID NO: 2736 - protein, 18 aa, Homo sapiens
  Table 3 sequence identifier: Q9P287_C275
  MOD_RES (13)..(13): May or may not be conjugated to a chemical probe
KFNYSVQEESDTCLGGKW

SEQ ID NO: 2737 - protein, 15 aa, Homo sapiens
  Table 3 sequence identifier: Q7LBC6_C1470
  MOD_RES (13)..(13): May or may not be conjugated to a chemical probe
KVRDFWDGFEIICKR

SEQ ID NO: 2738 - protein, 21 aa, Homo sapiens
  Table 3 sequence identifier: P62140_C171
  MOD_RES (5)..(5): May or may not be conjugated to a chemical probe
KIFCCHGGLSPDLQSMEQIRR

SEQ ID NO: 2739 - protein, 22 aa, Homo sapiens
  Table 3 sequence identifier: P33764_C68
  MOD_RES (12)..(12): May or may not be conjugated to a chemical probe
KFMSVLDTNKDCEVDFVEYVRS

SEQ ID NO: 2740 - protein, 27 aa, Homo sapiens
  Table 3 sequence identifier: Q9UBQ7_C123
  MOD_RES (25)..(25): May or may not be conjugated to a chemical probe
RVGYTPDVLTDTTAELAVSLLLTTCRR

SEQ ID NO: 2741 - protein, 12 aa, Homo sapiens
  Table 3 sequence identifier: Q9UJY4_C343
  MOD_RES (9)..(9): May or may not be conjugated to a chemical probe
RVFQNPAGCMKT

SEQ ID NO: 2742 - protein, 10 aa, Homo sapiens
  Table 3 sequence identifier: O60841_C1092
  MOD_RES (8)..(8): May or may not be conjugated to a chemical probe
KHIAVFPCKI

SEQ ID NO: 2743 - protein, 15 aa, Homo sapiens
  Table 3 sequence identifier: Q92945_C296
  MOD_RES (6)..(6): May or may not be conjugated to a chemical probe
KVQQACEMVMDILRE

SEQ ID NO: 2744 - protein, 28 aa, Homo sapiens
  Table 3 sequence identifier: Q9HAV4_C941
  MOD_RES (5)..(5): May or may not be conjugated to a chemical probe
RSLLCGEDEAADENPESQEMLEEQLVRM

SEQ ID NO: 2745 - protein, 11 aa, Homo sapiens
  Table 3 sequence identifier: O14964_C185
  MOD_RES (3)..(3): May or may not be conjugated to a chemical probe
RACGQIFCGKC

SEQ ID NO: 2746 - protein, 10 aa, Homo sapiens
  Table 3 sequence identifier: P23526_C195
  MOD_RES (8)..(8): May or may not be conjugated to a chemical probe
KFDNLYGCRE

SEQ ID NO: 2747 - protein, 11 aa, Homo sapiens
  Table 3 sequence identifier: P52209_C289
  MOD_RES (2)..(2): May or may not be conjugated to a chemical probe
RCLSSLKDERI

SEQ ID NO: 2748 - protein, 24 aa, Homo sapiens
  Table 3 sequence identifier: Q9Y697_C381
  MOD_RES (11)..(11): May or may not be conjugated to a chemical probe
KDVALSSGSACTSASLEPSYVLRA

SEQ ID NO: 2749 - protein, 46 aa, Homo sapiens
  Table 3 sequence identifier: Q9Y520_C177
  MOD_RES (7)..(7): May or may not be conjugated to a chemical probe
RPPNVACWRDGGKAAGSPSSSDQDEKLPGQDESTAGTSEQNDILKV

SEQ ID NO: 2750 - protein, 14 aa, Homo sapiens
  Table 3 sequence identifier: Q9H910_C118
  MOD_RES (7)..(7): May or may not be conjugated to a chemical probe
KDHVFLCEGEEPKS

SEQ ID NO: 2751 - protein, 25 aa, Homo sapiens
  Table 3 sequence identifier: Q6FI81_C92
  MOD_RES (8)..(8): May or may not be conjugated to a chemical probe
RILRPGGCLFLKEPVETAVDNNSKV

SEQ ID NO: 2752 - protein, 17 aa, Homo sapiens
  Table 3 sequence identifier: Q8WZA9_C340
  MOD_RES (11)..(11): May or may not be conjugated to a chemical probe
RTDGEGEDPECLGEGKM

SEQ ID NO: 2753 - protein, 38 aa, Homo sapiens; identical to SEQ ID NO: 929
  Table 3 sequence identifier: Q8NDH3_C81
  MOD_RES (36)..(36): May or may not be conjugated to a chemical probe

SEQ ID NO: 2754 - protein, 13 aa, Homo sapiens
  Table 3 sequence identifier: O00571_C317
  MOD_RES (3)..(3): May or may not be conjugated to a chemical probe
RGCHLLVATPGRL

SEQ ID NO: 2755 - protein, 25 aa, Homo sapiens
  Table 3 sequence identifier: P05091_C179
  MOD_RES (8)..(8): May or may not be conjugated to a chemical probe
RHEPVGVCGQIIPWNFPLLMQAWKL

SEQ ID NO: 2756 - protein, 33 aa, Homo sapiens
  Table 3 sequence identifier: P05091_C472
  MOD_RES (18)..(18): May or may not be conjugated to a chemical probe
KANYLSQALQAGTVWVNCYDVFGAQSPFGGYKM

SEQ ID NO: 2757 - protein, 12 aa, Homo sapiens
  Table 3 sequence identifier: O15235_C132
  MOD_RES (6)..(6): May or may not be conjugated to a chemical probe
RGKYDCGHVQKK

SEQ ID NO: 2758 - protein, 12 aa, Homo sapiens
  Table 3 sequence identifier: P42704_C130
  MOD_RES (3)..(3): May or may not be conjugated to a chemical probe
RSCGSLLPELKL

SEQ ID NO: 2759 - protein, 26 aa, Homo sapiens
  Table 3 sequence identifier: Q99590_C566
  MOD_RES (8)..(8): May or may not be conjugated to a chemical probe
KVYQPVSCPLSDLSENVESVVNEEKI

SEQ ID NO: 2760 - protein, 10 aa, Homo sapiens
  Table 3 sequence identifier: Q9NR56_C19
  MOD_RES (8)..(8): May or may not be conjugated to a chemical probe
KWLTLEVCRE

SEQ ID NO: 2761 - protein, 18 aa, Homo sapiens
  Table 3 sequence identifier: Q9P2E9_C1038
  MOD_RES (16)..(16): May or may not be conjugated to a chemical probe
KNWKAMEALATAEQACKE

SEQ ID NO: 2762 - protein, 15 aa, Homo sapiens
  Table 3 sequence identifier: P52888_C682
  MOD_RES (8)..(8): May or may not be conjugated to a chemical probe
KGLQVGGCEPEPQVC

SEQ ID NO: 2763 - protein, 16 aa, Homo sapiens
  Table 3 sequence identifier: P55212_C264
  MOD_RES (6)..(6): May or may not be conjugated to a chemical probe
RRVDFCKDPSAIGKKQ

SEQ ID NO: 2764 - protein, 20 aa, Homo sapiens
  Table 3 sequence identifier: Q6IBW4_C342
  MOD_RES (10)..(10): May or may not be conjugated to a chemical probe
KGRPYSVPPCVEEALGQKRK

SEQ ID NO: 2765 - protein, 21 aa, Homo sapiens
  Table 3 sequence identifier: P18754_C352
  MOD_RES (10)..(10): May or may not be conjugated to a chemical probe
RLPAVSSVACGASVGYAVTKD

SEQ ID NO: 2766 - protein, 39 aa, Homo sapiens
  Table 3 sequence identifier: Q8TB52_C433
  MOD_RES (30)..(30): May or may not be conjugated to a chemical probe
KAVDTSDLEVAEDPMGLQGIDLITAALLFCLGDSPGGRG

SEQ ID NO: 2767 - protein, 18 aa, Homo sapiens
  Table 3 sequence identifier: Q32MZ4_C644
  MOD_RES (12)..(12): May or may not be conjugated to a chemical probe
KIAAESSENVDCPENPKI

SEQ ID NO: 2768 - protein, 10 aa, Homo sapiens
  Table 3 sequence identifier: Q9NYL2_C150
  MOD_RES (3)..(3): May or may not be conjugated to a chemical probe
KICDFGASRF

SEQ ID NO: 2769 - protein, 11 aa, Homo sapiens
  Table 3 sequence identifier: Q15393_C1156
  MOD_RES (8)..(8): May or may not be conjugated to a chemical probe
RSEHPPLCGRD

SEQ ID NO: 2770 - protein, 19 aa, Homo sapiens
  Table 3 sequence identifier: P63244_C168
  MOD_RES (14)..(14): May or may not be conjugated to a chemical probe
RFSPNSSNPIIVSCGWDKL

SEQ ID NO: 2771 - protein, 18 aa, Homo sapiens
  Table 3 sequence identifier: Q53EL6_C275
  MOD_RES (9)..(9): May or may not be conjugated to a chemical probe
RAVGDGILCNTYIDSYKG

SEQ ID NO: 2772 - protein, 27 aa, Homo sapiens
  Table 3 sequence identifier: P56537_C152
  MOD_RES (14)..(14): May or may not be conjugated to a chemical probe
RQTVADQVLVGSYCVFSNQGGLVHPKT

SEQ ID NO: 2773 - protein, 15 aa, Homo sapiens
  Table 3 sequence identifier: P09622_C484
  MOD_RES (3)..(3): May or may not be conjugated to a chemical probe
RVCHAHPTLSEAFRE

SEQ ID NO: 2774 - protein, 14 aa, Homo sapiens
  Table 3 sequence identifier: Q9Y314_C185
  MOD_RES (5)..(5): May or may not be conjugated to a chemical probe
RTVTCPMSGKPLRM

SEQ ID NO: 2775 - protein, 32 aa, Homo sapiens
  Table 3 sequence identifier: Q96P16_C151
  MOD_RES (14)..(14): May or may not be conjugated to a chemical probe
RTYEQIKVDENENCSSLGSPSEPPQTLDLVRA

SEQ ID NO: 2776 - protein, 16 aa, Homo sapiens
  Table 3 sequence identifier: P46821_C2041
  MOD_RES (9)..(9): May or may not be conjugated to a chemical probe
RTPDTSTYCYETAEKI

SEQ ID NO: 2777 - protein, 51 aa, Homo sapiens
  Table 3 sequence identifier: O60343_C266
  MOD_RES (23)..(23): May or may not be conjugated to a chemical probe
RGPDPGEDLADLEVVVPGSPGDCLPEEADGTDTHLGLPAGASQPALTSSRV

SEQ ID NO: 2778 - protein, 19 aa, Homo sapiens
  Table 3 sequence identifier: Q96EB1_C361
  MOD_RES (7)..(7): May or may not be conjugated to a chemical probe
RLNNLICDESDVKDLAFKL

SEQ ID NO: 2779 - protein, 17 aa, Homo sapiens
  Table 3 sequence identifier: Q86WB0_C102
  MOD_RES (14)..(14): May or may not be conjugated to a chemical probe
KWAGKPFELSPLVCAKY

SEQ ID NO: 2780 - protein, 44 aa, Homo sapiens
  Table 3 sequence identifier: P49915_C104
  MOD_RES (35)..(35): May or may not be conjugated to a chemical probe
RAIIISGGPNSVYAEDAPWFDPAIFTIGKPVLGICYGMQMMNKV

SEQ ID NO: 2781 - protein, 16 aa, Homo sapiens
  Table 3 sequence identifier: O75608_C144
  MOD_RES (10)..(10): May or may not be conjugated to a chemical probe
KLAGVTALSCWLPLRA

SEQ ID NO: 2782 - protein, 15 aa, Homo sapiens
  Table 3 sequence identifier: P11498_C131
  MOD_RES (8)..(8): May or may not be conjugated to a chemical probe
RADFAQACQDAGVRF

SEQ ID NO: 2783 - protein, 21 aa, Homo sapiens
  Table 3 sequence identifier: P11498_C752
  MOD_RES (12)..(12): May or may not be conjugated to a chemical probe
KDMAGLLKPTACTMLVSSLRD

SEQ ID NO: 2784 - protein, 15 aa, Homo sapiens
  Table 3 sequence identifier: Q53H96_C266
  MOD_RES (13)..(13): May or may not be conjugated to a chemical probe
RAATMSAVEAATCRA

SEQ ID NO: 2785 - protein, 18 aa, Homo sapiens
  Table 3 sequence identifier: Q96DE5_C55
  MOD_RES (4)..(4): May or may not be conjugated to a chemical probe
RFLCESVFSYQVASTLKQ

SEQ ID NO: 2786 - protein, 22 aa, Homo sapiens
  Table 3 sequence identifier: Q96KB5_C112
  MOD_RES (12)..(12): May or may not be conjugated to a chemical probe
RAFTEANDGSLCLAMEYGGEKS

SEQ ID NO: 2787 - protein, 28 aa, Homo sapiens
  Table 3 sequence identifier: P55084_C458
  MOD_RES (12)..(12): May or may not be conjugated to a chemical probe
KEGGQYGLVAACAAGGQGHAMIVEAYPK

SEQ ID NO: 2788 - protein, 25 aa, Homo sapiens
  Table 3 sequence identifier: P55735_C234
  MOD_RES (19)..(19): May or may not be conjugated to a chemical probe
RDVAWAPSIGLPTSTIASCSQDGRV

SEQ ID NO: 2789 - protein, 34 aa, Homo sapiens
  Table 3 sequence identifier: P56192_C287
  MOD_RES (24)..(24): May or may not be conjugated to a chemical probe
RNVLITSALPYVNNVPHLGNIIGCVLSADVFARY

SEQ ID NO: 2790 - protein, 31 aa, Homo sapiens
  Table 3 sequence identifier: P07384_C115
  MOD_RES (12)..(12): May or may not be conjugated to a chemical probe
RTDICQGALGDCWLLAAIASLTLNDTLLHRV

SEQ ID NO: 2791 - protein, 13 aa, Homo sapiens
  Table 3 sequence identifier: P08559_C222
  MOD_RES (8)..(8): May or may not be conjugated to a chemical probe
KLPCIFICENNRY

SEQ ID NO: 2792 - protein, 17 aa, Homo sapiens
  Table 3 sequence identifier: Q99714_C91
  MOD_RES (8)..(8): May or may not be conjugated to a chemical probe
RVDVAVNCAGIAVASKT

SEQ ID NO: 2793 - protein, 13 aa, Homo sapiens
  Table 3 sequence identifier: P33992_C197
  MOD_RES (3)..(3): May or may not be conjugated to a chemical probe
RKCNTDQAGRPKC

SEQ ID NO: 2794 - protein, 26 aa, Homo sapiens
  Table 3 sequence identifier: P49757_C611
  MOD_RES (10)..(10): May or may not be conjugated to a chemical probe
RHTEVPTGTCPVDPFEAQWAALENKS

SEQ ID NO: 2795 - protein, 10 aa, Homo sapiens
  Table 3 sequence identifier: O15269_C438
  MOD_RES (2)..(2): May or may not be conjugated to a chemical probe
KCLPPPSIRV

SEQ ID NO: 2796 - protein, 24 aa, Homo sapiens
  Table 3 sequence identifier: O75935_C173
  MOD_RES (11)..(11): May or may not be conjugated to a chemical probe
KQFVQWDELLCQLEAATQVKPAEE

SEQ ID NO: 2797 - protein, 28 aa, Homo sapiens
  Table 3 sequence identifier: Q8IU85_C182
  MOD_RES (9)..(9): May or may not be conjugated to a chemical probe
KGDVMSTACGTPGYVAPEVLAQKPYSKA

SEQ ID NO: 2798 - protein, 10 aa, Homo sapiens
  Table 3 sequence identifier: Q05519_C455
  MOD_RES (5)..(5): May or may not be conjugated to a chemical probe
KTKECSVEKG

SEQ ID NO: 2799 - protein, 21 aa, Homo sapiens
  Table 3 sequence identifier: P36578_C125
  MOD_RES (5)..(5): May or may not be conjugated to a chemical probe
RYAICSALAASALPALVMSKG

SEQ ID NO: 2800 - protein, 11 aa, Homo sapiens
  Table 3 sequence identifier: Q96E14_C95
  MOD_RES (5)..(5): May or may not be conjugated to a chemical probe
RGRPCLVPGKY

SEQ ID NO: 2801 - protein, 27 aa, Homo sapiens
  Table 3 sequence identifier: Q96N67_C457
  MOD_RES (9)..(9): May or may not be conjugated to a chemical probe
RTTSGDDACNLTSFRPATLTVTNFFKQ

SEQ ID NO: 2802 - protein, 48 aa, Homo sapiens
  Table 3 sequence identifier: Q7Z5K2_C160
  MOD_RES (29)..(29): May or may not be conjugated to a chemical probe
KCFPLEDTLLGKEKSTNRIVEDDASISSCNKLITSDKVENFHEEHEKN

SEQ ID NO: 2803 - protein, 13 aa, Homo sapiens
  Table 3 sequence identifier: P41214_C489
  MOD_RES (3)..(3): May or may not be conjugated to a chemical probe
RICPIDITLAQRA

SEQ ID NO: 2804 - protein, 15 aa, Homo sapiens
  Table 3 sequence identifier: O43242_C483
  MOD_RES (5)..(5): May or may not be conjugated to a chemical probe
RISFCLDIHNMSVKA

SEQ ID NO: 2805 - protein, 34 aa, Homo sapiens
  Table 3 sequence identifier: O75369_C1280
  MOD_RES (14)..(14): May or may not be conjugated to a chemical probe
KAHIANPSGASTECFVTDNADGTYQVEYTPFEKG

SEQ ID NO: 2806 - protein, 13 aa, Homo sapiens
  Table 3 sequence identifier: Q8IWI9_C2974
  MOD_RES (5)..(5): May or may not be conjugated to a chemical probe
KVMPCLAPIAAKV

SEQ ID NO: 2807 - protein, 32 aa, Homo sapiens
  Table 3 sequence identifier: O15067_C785
  MOD_RES (13)..(13): May or may not be conjugated to a chemical probe
KLPGEGAALADACEAMVAVMAALGVAVDGGKD

SEQ ID NO: 2808 - protein, 12 aa, Homo sapiens
  Table 3 sequence identifier: Q96GX9_C16
  MOD_RES (2)..(2): May or may not be conjugated to a chemical probe
RCGAQDKEHPRY

SEQ ID NO: 2809 - protein, 16 aa, Homo sapiens
  Table 3 sequence identifier: Q9BXP5_C412
  MOD_RES (8)..(8): May or may not be conjugated to a chemical probe
KDAAGLECKPRPLHKT

SEQ ID NO: 2810 - protein, 21 aa, Homo sapiens
  Table 3 sequence identifier: O75083_C382
  MOD_RES (13)..(13): May or may not be conjugated to a chemical probe
RMTVDESGQLISCSMDDTVRY

SEQ ID NO: 2811 - protein, 10 aa, Homo sapiens
  Table 3 sequence identifier: Q8WVV9_C535
  MOD_RES (3)..(3): May or may not be conjugated to a chemical probe
KLCFSTSSHL

SEQ ID NO: 2812 - protein, 16 aa, Homo sapiens
  Table 3 sequence identifier: Q7Z6Z7_C1891
  MOD_RES (12)..(12): May or may not be conjugated to a chemical probe
RNPDIFTEVANCCIRI

SEQ ID NO: 2813 - protein, 21 aa, Homo sapiens
  Table 3 sequence identifier: Q7Z6Z7_C3296
  MOD_RES (19)..(19): May or may not be conjugated to a chemical probe
KSSNQLSWLSVSMDAALGCRT

SEQ ID NO: 2814 - protein, 26 aa, Homo sapiens
  Table 3 sequence identifier: Q14008_C1500
  MOD_RES (2)..(2): May or may not be conjugated to a chemical probe
RCEMPELVQHKLDDIFEPVLIPEPKI

SEQ ID NO: 2815 - protein, 13 aa, Homo sapiens
  Table 3 sequence identifier: Q9H3P2_C44
  MOD_RES (3)..(3): May or may not be conjugated to a chemical probe
RLCFHGLSSAVKL

SEQ ID NO: 2816 - protein, 21 aa, Homo sapiens
  Table 3 sequence identifier: Q8NB37_C154
  MOD_RES (16)..(16): May or may not be conjugated to a chemical probe
RSWVFDSYSLTGPSVCELVRA

SEQ ID NO: 2817 - protein, 24 aa, Homo sapiens
  Table 3 sequence identifier: P48047_C141
  MOD_RES (6)..(6): May or may not be conjugated to a chemical probe
RGEVPCTVTSASPLEEATLSELKT

SEQ ID NO: 2818 - protein, 26 aa, Homo sapiens
  Table 3 sequence identifier: Q8IUI8_C95
  MOD_RES (23)..(23): May or may not be conjugated to a chemical probe
RLVTLLQEVDTIEQETIKPLDDCQKL

SEQ ID NO: 2819 - protein, 20 aa, Homo sapiens
  Table 3 sequence identifier: Q9H6S3_C261
  MOD_RES (8)..(8): May or may not be conjugated to a chemical probe
KETQILNCALDDIEWFVARL

SEQ ID NO: 2820 - protein, 9 aa, Homo sapiens
  Table 3 sequence identifier: P21333_C53
  MOD_RES (3)..(3): May or may not be conjugated to a chemical probe
RWCNEHLKC

SEQ ID NO: 2821 - protein, 16 aa, Homo sapiens
  Table 3 sequence identifier: Q5T4S7_C3864
  MOD_RES (8)..(8): May or may not be conjugated to a chemical probe
RALSVLGCGHTSSTKC

SEQ ID NO: 2822 - protein, 12 aa, Homo sapiens
  Table 3 sequence identifier: P46060_C82
  MOD_RES (2)..(2): May or may not be conjugated to a chemical probe
RCHWSDMFTGRL

SEQ ID NO: 2823 - protein, 12 aa, Homo sapiens
  Table 3 sequence identifier: O14929_C299
  MOD_RES (8)..(8): May or may not be conjugated to a chemical probe
KLCQDLPCFSRE

SEQ ID NO: 2824 - protein, 17 aa, Homo sapiens
  Table 3 sequence identifier: P48059_C272
  MOD_RES (4)..(4): May or may not be conjugated to a chemical probe
KAWCVNCFACSTCNTKL

SEQ ID NO: 2825 - protein, 21 aa, Homo sapiens
  Table 3 sequence identifier: O15042_C65
  MOD_RES (5)..(5): May or may not be conjugated to a chemical probe
RESLCDSPHQNLSRPLLENKL

SEQ ID NO: 2826 - protein, 26 aa, Homo sapiens
  Table 3 sequence identifier: Q7L2J0_C244
  MOD_RES (12)..(12): May or may not be conjugated to a chemical probe
KDITDPLSLNTCTDEGHVVLASPLKT

SEQ ID NO: 2827 - protein, 16 aa, Homo sapiens
  Table 3 sequence identifier: Q4G176_C399
  MOD_RES (4)..(4): May or may not be conjugated to a chemical probe
REACSYTIHAEGDERG

SEQ ID NO: 2828 - protein, 32 aa, Homo sapiens
  Table 3 sequence identifier: Q9H1B7_C504
  MOD_RES (19)..(19): May or may not be conjugated to a chemical probe
KEGVPGADMLPQPYLDASCPMLPTALVSLSRA

SEQ ID NO: 2829 - protein, 26 aa, Homo sapiens
  Table 3 sequence identifier: O95425_C26
  MOD_RES (18)..(18): May or may not be conjugated to a chemical probe
RRLEGIENDTQPILLQSCTGLVTHRL

SEQ ID NO: 2830 - protein, 21 aa, Homo sapiens
  Table 3 sequence identifier: O75351_C240
  MOD_RES (17)..(17): May or may not be conjugated to a chemical probe
RENKPSIIFIDEIDSLCGSRS

SEQ ID NO: 2831 - protein, 28 aa, Homo sapiens
  Table 3 sequence identifier: Q96DC7_C57
  MOD_RES (12)..(12): May or may not be conjugated to a chemical probe
RNDAPEEAGEGCVAAILGETEVQQFLRQ

SEQ ID NO: 2832 - protein, 16 aa, Homo sapiens
  Table 3 sequence identifier: Q9ULW0_C594
  MOD_RES (10)..(10): May or may not be conjugated to a chemical probe
KNVTQIEPFCLETDRR

SEQ ID NO: 2833 - protein, 19 aa, Homo sapiens
  Table 3 sequence identifier: P50502_C209
  MOD_RES (17)..(17): May or may not be conjugated to a chemical probe
RLLGHWEEAAHDLALACKL

SEQ ID NO: 2834 - protein, 23 aa, Homo sapiens
  Table 3 sequence identifier: P31146_C51
  MOD_RES (7)..(7): May or may not be conjugated to a chemical probe
KFVALICEASGGGAFLVLPLGKT

SEQ ID NO: 2835 - protein, 12 aa, Homo sapiens
  Table 3 sequence identifier: P31146_C345
  MOD_RES (2)..(2): May or may not be conjugated to a chemical probe
RCEPIAMTVPRK

SEQ ID NO: 2836 - protein, 30 aa, Homo sapiens
  Table 3 sequence identifier: Q9H2M9_C67
  MOD_RES (28)..(28): May or may not be conjugated to a chemical probe
KSTDWEDDGWGAWEENEPQEPEEEGNTCKT

SEQ ID NO: 2837 - protein, 17 aa, Homo sapiens
  Table 3 sequence identifier: Q9UKV3_C546
  MOD_RES (7)..(7): May or may not be conjugated to a chemical probe
KGITEECLKQPSLEQKE

SEQ ID NO: 2838 - protein, 38 aa, Homo sapiens
  Table 3 sequence identifier: P78527_C1229
  MOD_RES (21)..(21): May or may not be conjugated to a chemical probe
KDVLKEEGVSFLINTFEGGGCGQPSGILAQPTLLYLRG

SEQ ID NO: 2839 - protein, 11 aa, Homo sapiens
  Table 3 sequence identifier: P78527_C1364
  MOD_RES (4)..(4): May or may not be conjugated to a chemical probe
KDLCNTHLMRV

SEQ ID NO: 2840 - protein, 14 aa, Homo sapiens
  Table 3 sequence identifier: P42566_C657
  MOD_RES (10)..(10): May or may not be conjugated to a chemical probe
KGSDPFASDCFFRQ

SEQ ID NO: 2841 - protein, 12 aa, Homo sapiens
  Table 3 sequence identifier: P61981_C112
  MOD_RES (3)..(3): May or may not be conjugated to a chemical probe
KNCSETQYESKV

SEQ ID NO: 2842 - protein, 21 aa, Homo sapiens
  Table 3 sequence identifier: P20810_C381
  MOD_RES (19)..(19): May or may not be conjugated to a chemical probe
RSESELIDELSEDFDRSECKE

SEQ ID NO: 2843 - protein, 30 aa, Homo sapiens
  Table 3 sequence identifier: P55036_C58
  MOD_RES (17)..(17): May or may not be conjugated to a chemical probe
RSNPENNVGLITLANDCEVLTTLTPDTGRI

SEQ ID NO: 2844 - protein, 13 aa, Homo sapiens
  Table 3 sequence identifier: P50991_C295
  MOD_RES (5)..(5): May or may not be conjugated to a chemical probe
KKTGCNVLLIQKS

SEQ ID NO: 2845 - protein, 32 aa, Homo sapiens
  Table 3 sequence identifier: Q96TA1_C230
  MOD_RES (11)..(11): May or may not be conjugated to a chemical probe
KELYGTWEMLCGNEVQILSNLVMEELGPELKA

SEQ ID NO: 2846 - protein, 24 aa, Homo sapiens
  Table 3 sequence identifier: P49848_C141
  MOD_RES (10)..(10): May or may not be conjugated to a chemical probe
KAHWLSIEGCQPAIPENPPPAPKE

SEQ ID NO: 2847 - protein, 11 aa, Homo sapiens
  Table 3 sequence identifier: Q14315_C1066
  MOD_RES (3)..(3): May or may not be conjugated to a chemical probe
KVCAYGPGLKG

SEQ ID NO: 2848 - protein, 23 aa, Homo sapiens
  Table 3 sequence identifier: O94925_C525
  MOD_RES (13)..(13): May or may not be conjugated to a chemical probe
KGIHFCHDLVSLCNFHNYDNLRH

SEQ ID NO: 2849 - protein, 33 aa, Homo sapiens
  Table 3 sequence identifier: Q92796_C519
  MOD_RES (4)..(4): May or may not be conjugated to a chemical probe
RDSCLPSQGLSFSYGDILHVINASDDEWWQARL

SEQ ID NO: 2850 - protein, 12 aa, Homo sapiens
  Table 3 sequence identifier: O95571_C219
  MOD_RES (6)..(6): May or may not be conjugated to a chemical probe
RLTLSCEEFVKI

SEQ ID NO: 2851 - protein, 15 aa, Homo sapiens
  Table 3 sequence identifier: Q9ULU8_C800
  MOD_RES (3)..(3): May or may not be conjugated to a chemical probe
RYCFPFGRPEGALKA

SEQ ID NO: 2852 - protein, 33 aa, Homo sapiens
  Table 3 sequence identifier: P50453_C335
  MOD_RES (19)..(19): May or may not be conjugated to a chemical probe
KSFVEVNEEGTEAAAASSCFVVAECCMESGPRF

SEQ ID NO: 2853 - protein, 47 aa, Homo sapiens
  Table 3 sequence identifier: O95999_C215
  MOD_RES (35)..(35): May or may not be conjugated to a chemical probe
RTENTIFSSTTLPRPGDPGAPPLPPDLQLEEEGTCANSSEMFLPLRS

SEQ ID NO: 2854 - protein, 27 aa, Homo sapiens
  Table 3 sequence identifier: Q9H4Z3_C29
  MOD_RES (20)..(20): May or may not be conjugated to a chemical probe
REEASLLSHSPGTSNQSQPCSPKPIRL

SEQ ID NO: 2855 - protein, 17 aa, Homo sapiens
  Table 3 sequence identifier: P22692_C204
  MOD_RES (14)..(14): May or may not be conjugated to a chemical probe
RTHEDLYIIPIPNCDRN

SEQ ID NO: 2856 - protein, 13 aa, Homo sapiens
  Table 3 sequence identifier: O00148_C223
  MOD_RES (3)..(3): May or may not be conjugated to a chemical probe
KQCMMFSATLSKD

SEQ ID NO: 2857 - protein, 45 aa, Homo sapiens
  Table 3 sequence identifier: Q5VYK3_C814
  MOD_RES (36)..(36): May or may not be conjugated to a chemical probe
RNADTLPDQEELIQSATETIGSFLDSTSPLLAIAACTALGEIGRN

SEQ ID NO: 2858 - protein, 9 aa, Homo sapiens
  Table 3 sequence identifier: Q9NVE7_C537
  MOD_RES (2)..(2): May or may not be conjugated to a chemical probe
RCFPGVVRS

SEQ ID NO: 2859 - protein, 19 aa, Homo sapiens
  Table 3 sequence identifier: O95801_C63
  MOD_RES (8)..(8): May or may not be conjugated to a chemical probe
RENPDLACLQSIIFDEERS

SEQ ID NO: 2860 - protein, 32 aa, Homo sapiens
  Table 3 sequence identifier: Q14204_C2142
  MOD_RES (25)..(25): May or may not be conjugated to a chemical probe
RGEAVDEGEIAENLPEQEILIQSVCETMVPKL

SEQ ID NO: 2861 - protein, 15 aa, Homo sapiens
  Table 3 sequence identifier: P48735_C418
  MOD_RES (6)..(6): May or may not be conjugated to a chemical probe
KDLAGCIHGLSNVKL

SEQ ID NO: 2862 - protein, 22 aa, Homo sapiens
  Table 3 sequence identifier: O15371_C258
  MOD_RES (19)..(19): May or may not be conjugated to a chemical probe
KTQGNVFATDAILATLMSCTRS

SEQ ID NO: 2863 - protein, 21 aa, Homo sapiens
  Table 3 sequence identifier: O00571_C128
  MOD_RES (3)..(3): May or may not be conjugated to a chemical probe
RWCDKSDEDDWSKPLPPSERL

SEQ ID NO: 2864 - protein, 15 aa, Homo sapiens
  Table 3 sequence identifier: Q8WVC0_C530
  MOD_RES (12)..(12): May or may not be conjugated to a chemical probe
RILPMAGRDPECQRT

SEQ ID NO: 2865 - protein, 11 aa, Homo sapiens
  Table 3 sequence identifier: O15235_C64
  MOD_RES (6)..(6): May or may not be conjugated to a chemical probe
KGVVLCTFTRK

SEQ ID NO: 2866 - protein, 15 aa, Homo sapiens
  Table 3 sequence identifier: Q9P2I0_C621
  MOD_RES (13)..(13): May or may not be conjugated to a chemical probe
RLKDSLVSSLQFCKA

SEQ ID NO: 2867 - protein, 50 aa, Homo sapiens
  Table 3 sequence identifier: Q9H4X1_C33
  MOD_RES (33)..(33): May or may not be conjugated to a chemical probe
MKPPAAQGSPAAAAAAAPALDSAAAEDLSDALCEFDAVLADFASPFHERH

SEQ ID NO: 2868 - protein, 13 aa, Homo sapiens
  Table 3 sequence identifier: Q7L5N1_C299
  MOD_RES (3)..(3): May or may not be conjugated to a chemical probe
KTCNTMNQFVNKF

SEQ ID NO: 2869 - protein, 20 aa, Homo sapiens
  Table 3 sequence identifier: Q6NYC8_C611
  MOD_RES (18)..(18): May or may not be conjugated to a chemical probe
ALIVDESCRKALIVDESCRR

SEQ ID NO: 2870 - protein, 10 aa, Homo sapiens
  Table 3 sequence identifier: P22626_C50
  MOD_RES (5)..(5): May or may not be conjugated to a chemical probe
KLTDCVVMRD

SEQ ID NO: 2871 - protein, 16 aa, Homo sapiens
  Table 3 sequence identifier: P55072_C105
  MOD_RES (11)..(11): May or may not be conjugated to a chemical probe
RLGDVISIQPCPDVKY

SEQ ID NO: 2872 - protein, 33 aa, Homo sapiens
  Table 3 sequence identifier: P11912_C196
  MOD_RES (24)..(24): May or may not be conjugated to a chemical probe
KLGLDAGDEYEDENLYEGLNLDDCSMYEDISRG

SEQ ID NO: 2873 - protein, 13 aa, Homo sapiens
  Table 3 sequence identifier: Q9NSE4_C91
  MOD_RES (2)..(2): May or may not be conjugated to a chemical probe
KCGFSELYSWQRE

SEQ ID NO: 2874 - protein, 17 aa, Homo sapiens
  Table 3 sequence identifier: Q9NSE4_C819
  MOD_RES (3)..(3): May or may not be conjugated to a chemical probe
RSCQTALVEILDVIVRS

SEQ ID NO: 2875 - protein, 14 aa, Homo sapiens
  Table 3 sequence identifier: Q9NYF8_C688
  MOD_RES (2)..(2): May or may not be conjugated to a chemical probe
RCDSADLRHDIDRR

SEQ ID NO: 2876 - protein, 37 aa, Homo sapiens
  Table 3 sequence identifier: Q15393_C750
  MOD_RES (23)..(23): May or may not be conjugated to a chemical probe
RFHLTPLSYETLEFASGFASEQCPEGIVAISTNTLRI

SEQ ID NO: 2877 - protein, 18 aa, Homo sapiens
  Table 3 sequence identifier: Q16576_C166
  MOD_RES (12)..(12): May or may not be conjugated to a chemical probe
KHPAKPDPSGECNPDLRL

SEQ ID NO: 2878 - protein, 30 aa, Homo sapiens
  Table 3 sequence identifier: Q9NZB2_C279
  MOD_RES (24)..(24): May or may not be conjugated to a chemical probe
AHQLVLPPCDVVIKRAHQLVLPPCDVVIKA

SEQ ID NO: 2879 - protein, 12 aa, Homo sapiens
  Table 3 sequence identifier: Q15052_C25
  MOD_RES (4)..(4): May or may not be conjugated to a chemical probe
KTICDPEEFLKS

SEQ ID NO: 2880 - protein, 19 aa, Homo sapiens
  Table 3 sequence identifier: P09622_C80
  MOD_RES (9)..(9): May or may not be conjugated to a chemical probe
KNETLGGTCLNVGCIPSKA

SEQ ID NO: 2881 - protein, 32 aa, Homo sapiens
  Table 3 sequence identifier: Q96EP0_C551
  MOD_RES (27)..(27): May or may not be conjugated to a chemical probe
RSELPYVLEMVAELAGQQDPGLGAFSCQEARR

SEQ ID NO: 2882 - protein, 23 aa, Homo sapiens
  Table 3 sequence identifier: P50579_C121
  MOD_RES (12)..(12): May or may not be conjugated to a chemical probe
KVQTDPPSVPICDLYPNGVFPKG

SEQ ID NO: 2883 - protein, 38 aa, Homo sapiens
  Table 3 sequence identifier: Q7Z434_C133
  MOD_RES (36)..(36): May or may not be conjugated to a chemical probe
RTSDRPPDPLEPPSLPAERPGPPTPAAAHSIPYNSCRE

SEQ ID NO: 2884 - protein, 20 aa, Homo sapiens
  Table 3 sequence identifier: Q29RF7_C327
  MOD_RES (15)..(15): May or may not be conjugated to a chemical probe
KDSDLATQNRPLWQCFLGRF

SEQ ID NO: 2885 - protein, 14 aa, Homo sapiens
  Table 3 sequence identifier: Q86WB0_C406
  MOD_RES (3)..(3): May or may not be conjugated to a chemical probe
RLCSSSSSDTSSRS

SEQ ID NO: 2886 - protein, 9 aa, Homo sapiens
  Table 3 sequence identifier: Q9Y490_C1953
  MOD_RES (6)..(6): May or may not be conjugated to a chemical probe
KELIECARR

SEQ ID NO: 2887 - protein, 25 aa, Homo sapiens
  Table 3 sequence identifier: P43243_C230
  MOD_RES (2)..(2): May or may not be conjugated to a chemical probe
RCRDDSFFGETSHNYHKFDSEYERM

SEQ ID NO: 2888 - protein, 10 aa, Homo sapiens
  Table 3 sequence identifier: P62913_C72
  MOD_RES (6)..(6): May or may not be conjugated to a chemical probe
KIAVHCTVRG

SEQ ID NO: 2889 - protein, 9 aa, Homo sapiens
  Table 3 sequence identifier: O00422_C26
  MOD_RES (3)..(3): May or may not be conjugated to a chemical probe
KTCPLLLRV

SEQ ID NO: 2890 - protein, 15 aa, Homo sapiens
  Table 3 sequence identifier: O60921_C200
  MOD_RES (8)..(8): May or may not be conjugated to a chemical probe
KIETELVCVTTHFKD

SEQ ID NO: 2891 - protein, 26 aa, Homo sapiens
  Table 3 sequence identifier: O96017_C385
  MOD_RES (4)..(4): May or may not be conjugated to a chemical probe
RTLCGTPTYLAPEVLVSVGTAGYNRA

SEQ ID NO: 2892 - protein, 9 aa, Homo sapiens
  Table 3 sequence identifier: P36969_C93
  MOD_RES (5)..(5): May or may not be conjugated to a chemical probe
RYAECGLRI

SEQ ID NO: 2893 - protein, 28 aa, Homo sapiens
  Table 3 sequence identifier: Q96IZ0_C173
  MOD_RES (13)..(13): May or may not be conjugated to a chemical probe
RSTGVVNIPAAECLDEYEDDEAGQKERK

SEQ ID NO: 2894 - protein, 21 aa, Homo sapiens
  Table 3 sequence identifier: P36871_C101
  MOD_RES (17)..(17): May or may not be conjugated to a chemical probe
RLVIGQNGILSTPAVSCIIRK

SEQ ID NO: 2895 - protein, 22 aa, Homo sapiens
  Table 3 sequence identifier: Q9BXF6_C337
  MOD_RES (5)..(5): May or may not be conjugated to a chemical probe
RSSLCVNGSHIYNEEPQGPVRH

SEQ ID NO: 2896 - protein, 17 aa, Homo sapiens
  Table 3 sequence identifier: Q99873_C262
  MOD_RES (12)..(12): May or may not be conjugated to a chemical probe
KVEDLTFTSPFCLQVKR

SEQ ID NO: 2897 - protein, 14 aa, Homo sapiens
  Table 3 sequence identifier: P09382_C43
  MOD_RES (7)..(7): May or may not be conjugated to a chemical probe
KDSNNLCLHFNPRF

SEQ ID NO: 2898 - protein, 18 aa, Homo sapiens
  Table 3 sequence identifier: O75934_C132
  MOD_RES (13)..(13): May or may not be conjugated to a chemical probe
RIENLELMSQHGCNAWKV

SEQ ID NO: 2899 - protein, 11 aa, Homo sapiens
  Table 3 sequence identifier: Q92538_C685
  MOD_RES (4)..(4): May or may not be conjugated to a chemical probe
RFSCLLPDPRE

SEQ ID NO: 2900 - protein, 34 aa, Homo sapiens
  Table 3 sequence identifier: P55039_C99
  MOD_RES (25)..(25): May or may not be conjugated to a chemical probe
KSTFLSLMTSTASEAASYEFTTLTCIPGVIEYKG

SEQ ID NO: 2901 - protein, 13 aa, Homo sapiens
  Table 3 sequence identifier: O43414_C285
  MOD_RES (9)..(9): May or may not be conjugated to a chemical probe
KAYSFAMGCWPKN

SEQ ID NO: 2902 - protein, 19 aa, Homo sapiens
  Table 3 sequence identifier: Q14974_C228
  MOD_RES (14)..(14): May or may not be conjugated to a chemical probe
RHFIMQVVCEATQCPDTRV

SEQ ID NO: 2903 - protein, 17 aa, Homo sapiens
  Table 3 sequence identifier: P30050_C17
  MOD_RES (2)..(2): May or may not be conjugated to a chemical probe
RCTGGEVGATSALAPKI

SEQ ID NO: 2904 - protein, 10 aa, Homo sapiens
  Table 3 sequence identifier: P78347_C475
  MOD_RES (8)..(8): May or may not be conjugated to a chemical probe
KMVDQLFCKK

SEQ ID NO: 2905 - protein, 15 aa, Homo sapiens
  Table 3 sequence identifier: Q9H3M7_C247
  MOD_RES (10)..(10): May or may not be conjugated to a chemical probe
RGNHIISGTCASWRG

SEQ ID NO: 2906 - protein, 33 aa, Homo sapiens
  Table 3 sequence identifier: P08047_C68
  MOD_RES (30)..(30): May or may not be conjugated to a chemical probe
RSSSTGSSSSTGGGGQESQPSPLALLAATCSRI

SEQ ID NO: 2907 - protein, 9 aa, Homo sapiens
  Table 3 sequence identifier: O43242_C210
  MOD_RES (2)..(2): May or may not be conjugated to a chemical probe
KCYYYHARV

SEQ ID NO: 2908 - protein, 13 aa, Homo sapiens
  Table 3 sequence identifier: Q9UPN3_C4206
  MOD_RES (6)..(6): May or may not be conjugated to a chemical probe
RFEQLCLQQQEKE

SEQ ID NO: 2909 - protein, 19 aa, Homo sapiens
  Table 3 sequence identifier: Q14103_C126
  MOD_RES (8)..(8): May or may not be conjugated to a chemical probe
KFGEVVDCTLKLDPITGRS

SEQ ID NO: 2910 - protein, 23 aa, Homo sapiens
  Table 3 sequence identifier: Q9BY32_C33
  MOD_RES (16)..(16): May or may not be conjugated to a chemical probe
KKLEEVVQILGDKFPCTLVAQKI

SEQ ID NO: 2911 - protein, 17 aa, Homo sapiens
  Table 3 sequence identifier: Q9BQ52_C670
  MOD_RES (11)..(11): May or may not be conjugated to a chemical probe
KVVYSGDTMPCEALVRM

SEQ ID NO: 2912 - protein, 30 aa, Homo sapiens
  Table 3 sequence identifier: O15067_C318
  MOD_RES (17)..(17): May or may not be conjugated to a chemical probe
RHVVFTAETHNFPTGVCPFSGATTGTGGRI

SEQ ID NO: 2913 - protein, 9 aa, Homo sapiens
  Table 3 sequence identifier: Q9H9J2_C53
  MOD_RES (2)..(2): May or may not be conjugated to a chemical probe
RCPPPPVRR

SEQ ID NO: 2914 - protein, 15 aa, Homo sapiens
  Table 3 sequence identifier: Q00610_C151
  MOD_RES (8)..(8): May or may not be conjugated to a chemical probe
RHSSLAGCQIINYRT

SEQ ID NO: 2915 - protein, 9 aa, Homo sapiens
  Table 3 sequence identifier: P09497_C199
  MOD_RES (3)..(3): May or may not be conjugated to a chemical probe
RLCDFNPKS

SEQ ID NO: 2916 - protein, 11 aa, Homo sapiens
  Table 3 sequence identifier: Q9Y617_C224
  MOD_RES (3)..(3): May or may not be conjugated to a chemical probe
RECPSVLEYKV

SEQ ID NO: 2917 - protein, 20 aa, Homo sapiens
  Table 3 sequence identifier: P46013_C1007
  MOD_RES (4)..(4): May or may not be conjugated to a chemical probe
KMPCQSLQPEPINTPTHTKQ

SEQ ID NO: 2918 - protein, 13 aa, Homo sapiens
  Table 3 sequence identifier: Q9BSD7_C101
  MOD_RES (5)..(5): May or may not be conjugated to a chemical probe
RNADCSSGPGQRV

SEQ ID NO: 2919 - protein, 24 aa, Homo sapiens
  Table 3 sequence identifier: Q7Z6Z7_C349
  MOD_RES (8)..(8): May or may not be conjugated to a chemical probe
KLSSIIDCTGTASYHGFLPVLVRN

SEQ ID NO: 2920 - protein, 10 aa, Homo sapiens
  Table 3 sequence identifier: Q14919_C54
  MOD_RES (3)..(3): May or may not be conjugated to a chemical probe
KACQVTQSRN

SEQ ID NO: 2921 - protein, 11 aa, Homo sapiens
  Table 3 sequence identifier: Q9UNE7_C199
  MOD_RES (6)..(6): May or may not be conjugated to a chemical probe
RAQQACIEAKH

SEQ ID NO: 2922 - protein, 27 aa, Homo sapiens
  Table 3 sequence identifier: Q16881_C515
  MOD_RES (2)..(2): May or may not be conjugated to a chemical probe
KCDYENVPTTVFTPLEYGACGLSEEKA

SEQ ID NO: 2923 - protein, 10 aa, Homo sapiens
  Table 3 sequence identifier: P09936_C220
  MOD_RES (8)..(8): May or may not be conjugated to a chemical probe
RFSAVALCKA

SEQ ID NO: 2924 - protein, 37 aa, Homo sapiens
  Table 3 sequence identifier: Q9NZJ9_C147
  MOD_RES (4)..(4): May or may not be conjugated to a chemical probe
KLGCSPANGNSTVPSLPDNNALFVTAAQTSGLPSSVR

SEQ ID NO: 2925 - protein, 12 aa, Homo sapiens
  Table 3 sequence identifier: Q5T4S7_C2554
  MOD_RES (5)..(5): May or may not be conjugated to a chemical probe
KAVQCLNTSSKE

SEQ ID NO: 2926 - protein, 47 aa, Homo sapiens
  Table 3 sequence identifier: Q96C19_C53
  MOD_RES (41)..(41): May or may not be conjugated to a chemical probe
RLQMEGEGGGETPEQPGLNGAAAAAAGAPDEAAEALGSADCELSAKL

SEQ ID NO: 2927 - protein, 11 aa, Homo sapiens
  Table 3 sequence identifier: Q8N6M0_C292
  MOD_RES (10)..(10): May or may not be conjugated to a chemical probe
RLVNIVTENCS

SEQ ID NO: 2928 - protein, 31 aa, Homo sapiens
  Table 3 sequence identifier: Q8N201_C1633
  MOD_RES (24)..(24): May or may not be conjugated to a chemical probe
RLGPSSGLLVDWLEMLDPEVVSSCPDLQLRL

SEQ ID NO: 2929 - protein, 44 aa, Homo sapiens
  Table 3 sequence identifier: O95294_C301
  MOD_RES (42)..(42): May or may not be conjugated to a chemical probe
RVLPSQCYQPLMELLMESVQGPAEEDTASPLALLEELTLGDCRQ

SEQ ID NO: 2930 - protein, 17 aa, Homo sapiens
  Table 3 sequence identifier: Q9UKX7_C181
  MOD_RES (9)..(9): May or may not be conjugated to a chemical probe
KHVNTNPLCDLTPIFKD

SEQ ID NO: 2931 - protein, 11 aa, Homo sapiens
  Table 3 sequence identifier: Q92616_C1595
  MOD_RES (2)..(2): May or may not be conjugated to a chemical probe
KCLQTLLDTKF

SEQ ID NO: 2932 - protein, 21 aa, Homo sapiens
  Table 3 sequence identifier: P49327_C2024
  MOD_RES (18)..(18): May or may not be conjugated to a chemical probe
REACPELDYFVVFSSVSCGRG

SEQ ID NO: 2933 - protein, 11 aa, Homo sapiens
  Table 3 sequence identifier: Q16877_C106
  MOD_RES (4)..(4): May or may not be conjugated to a chemical probe
RKQCALAALRD

SEQ ID NO: 2934 - protein, 11 aa, Homo sapiens
  Table 3 sequence identifier: Q96JP5_C182
  MOD_RES (9)..(9): May or may not be conjugated to a chemical probe
KTGSLQLICKS

SEQ ID NO: 2935 - protein, 16 aa, Homo sapiens
  Table 3 sequence identifier: Q99538_C50
  MOD_RES (7)..(7): May or may not be conjugated to a chemical probe
RHQADACHAYQIIHRN

SEQ ID NO: 2936 - protein, 23 aa, Homo sapiens
  Table 3 sequence identifier: Q96RS6_C32
  MOD_RES (9)..(9): May or may not be conjugated to a chemical probe
KLSLEPLPCYQLELDAAVAEVKL

SEQ ID NO: 2937 - protein, 20 aa, Homo sapiens
  Table 3 sequence identifier: Q96RS6_C513
  MOD_RES (17)..(17): May or may not be conjugated to a chemical probe
KFFACAPNYSYAALCECLRR

SEQ ID NO: 2938 - protein, 18 aa, Homo sapiens
  Table 3 sequence identifier: Q8TBC4_C28
  MOD_RES (8)..(8): May or may not be conjugated to a chemical probe
KMAVDGGCGDTGDWEGRW

SEQ ID NO: 2939 - protein, 18 aa, Homo sapiens
  Table 3 sequence identifier: Q14839_C1827
  MOD_RES (7)..(7): May or may not be conjugated to a chemical probe
RFAEVECLAESHQHLSKE

SEQ ID NO: 2940 - protein, 17 aa, Homo sapiens
  Table 3 sequence identifier: Q9Y2D5_C205
  MOD_RES (14)..(14): May or may not be conjugated to a chemical probe
KLFEDDEHEKEQYCIRK

SEQ ID NO: 2941 - protein, 13 aa, Homo sapiens
  Table 3 sequence identifier: Q9UQ35_C956
  MOD_RES (6)..(6): May or may not be conjugated to a chemical probe
RSVSPCSNVESRL

SEQ ID NO: 2942 - protein, 19 aa, Homo sapiens
  Table 3 sequence identifier: O60711_C358
  MOD_RES (12)..(12): May or may not be conjugated to a chemical probe
KFHPEHFVCAFCLTQLSKG

SEQ ID NO: 2943 - protein, 23 aa, Homo sapiens
  Table 3 sequence identifier: Q00013_C454
  MOD_RES (11)..(11): May or may not be conjugated to a chemical probe
KKLQEAFDQACSSPQWVPVSWVY

SEQ ID NO: 2944 - protein, 31 aa, Homo sapiens
  Table 3 sequence identifier: Q6P1L8_C57
  MOD_RES (24)..(24): May or may not be conjugated to a chemical probe
KMTRVRVVDNSALGNSPYHRAPRCIHVYKKN

SEQ ID NO: 2945 - protein, 9 aa, Homo sapiens
  Table 3 sequence identifier: Q92973_C620
  MOD_RES (2)..(2): May or may not be conjugated to a chemical probe
RCVNLVQKT

SEQ ID NO: 2946 - protein, 10 aa, Homo sapiens
  Table 3 sequence identifier: P42575_C320
  MOD_RES (8)..(8): May or may not be conjugated to a chemical probe
KMFFIQACRG

SEQ ID NO: 2947 - protein, 28 aa, Homo sapiens
  Table 3 sequence identifier: P35520_C431
  MOD_RES (19)..(19): May or may not be conjugated to a chemical probe
RVQELGLSAPLTVLPTITCGHTIEILRE

SEQ ID NO: 2948 - protein, 20 aa, Homo sapiens
  Table 3 sequence identifier: O95425_C1237
  MOD_RES (17)..(17): May or may not be conjugated to a chemical probe
KGLASPTAITPVASPICGKT

SEQ ID NO: 2949 - protein, 12 aa, Homo sapiens
  Table 3 sequence identifier: Q9Y305_C299
  MOD_RES (6)..(6): May or may not be conjugated to a chemical probe
KSLEICHPQERN

SEQ ID NO: 2950 - protein, 26 aa, Homo sapiens
  Table 3 sequence identifier: P32321_C83
  MOD_RES (15)..(15): May or may not be conjugated to a chemical probe
RTAENKLDTKYPYVCHAELNAIMNKN

SEQ ID NO: 2951 - protein, 32 aa, Homo sapiens
  Table 3 sequence identifier: P61158_C189
  MOD_RES (29)..(29): May or may not be conjugated to a chemical probe
RTLTGTVIDSGDGVTHVIPVAEGYVIGSCIKH

SEQ ID NO: 2952 - protein, 16 aa, Homo sapiens
  Table 3 sequence identifier: P11413_C158
  MOD_RES (7)..(7): May or may not be conjugated to a chemical probe
KNIHESCMSQIGWNRI

SEQ ID NO: 2953 - protein, 21 aa, Homo sapiens
  Table 3 sequence identifier: P04181_C93
  MOD_RES (17)..(17): May or may not be conjugated to a chemical probe
KYFDFLSSYSAVNQGHCHPKI

SEQ ID NO: 2954 - protein, 12 aa, Homo sapiens
  Table 3 sequence identifier: P15880_C182
  MOD_RES (10)..(10): May or may not be conjugated to a chemical probe
KIGKPHTVPCKV

SEQ ID NO: 2955 - protein, 27 aa, Homo sapiens
  Table 3 sequence identifier: P01871_C88
  MOD_RES (25)..(25): May or may not be conjugated to a chemical probe
KYAATSQVLLPSKDVMQGTDEHVVCKV

SEQ ID NO: 2956 - protein, 28 aa, Homo sapiens
  Table 3 sequence identifier: P50991_C120
  MOD_RES (25)..(25): May or may not be conjugated to a chemical probe
KAQDIEAGDGTTSVVIIAGSLLDSCTKL

SEQ ID NO: 2957 - protein, 19 aa, Homo sapiens
  Table 3 sequence identifier: P57678_C210
  MOD_RES (7)..(7): May or may not be conjugated to a chemical probe
RSDPDACPTMPLLAMLLRG

SEQ ID NO: 2958 - protein, 15 aa, Homo sapiens
  Table 3 sequence identifier: O94925_C287
  MOD_RES (9)..(9): May or may not be conjugated to a chemical probe
KVPFCLQSCVKPLKY

SEQ ID NO: 2959 - protein, 22 aa, Homo sapiens
  Table 3 sequence identifier: Q8N3D4_C1364
  MOD_RES (10)..(10): May or may not be conjugated to a chemical probe
RFQDTSQYVCAELQALEQEQRQ

SEQ ID NO: 2960 - protein, 18 aa, Homo sapiens
  Table 3 sequence identifier: Q8IUF8_C19
  MOD_RES (16)..(16): May or may not be conjugated to a chemical probe
KAKPTGSGKEEGPAPCKQ

SEQ ID NO: 2961 - protein, 21 aa, Homo sapiens
  Table 3 sequence identifier: Q9NXH9_C376
  MOD_RES (6)..(6): May or may not be conjugated to a chemical probe
KFSAACGPPVTPECEHCGQRH

SEQ ID NO: 2962 - protein, 31 aa, Homo sapiens
  Table 3 sequence identifier: P00505_C382
  MOD_RES (19)..(19): May or may not be conjugated to a chemical probe
KEGSTHNWQHITDQIGMFCFTGLKPEQVERL

SEQ ID NO: 2963 - protein, 14 aa, Homo sapiens
  Table 3 sequence identifier: A0JLT2_C62
  MOD_RES (6)..(6): May or may not be conjugated to a chemical probe
KSGAGCGPFYLMRE

SEQ ID NO: 2964 - protein, 18 aa, Homo sapiens
  Table 3 sequence identifier: O15382_C135
  MOD_RES (3)..(3): May or may not be conjugated to a chemical probe
RLCLPSFDKLELLECIRR

SEQ ID NO: 2965 - protein, 28 aa, Homo sapiens
  Table 3 sequence identifier: P52789_C606
  MOD_RES (15)..(15): May or may not be conjugated to a chemical probe
KGVSLPLGFTFSFPCQQNSLDESILLKW

SEQ ID NO: 2966 - protein, 15 aa, Homo sapiens
  Table 3 sequence identifier: Q9Y3C8_C116
  MOD_RES (3)..(3): May or may not be conjugated to a chemical probe
KICLTDHFKPLWARN

SEQ ID NO: 2967 - protein, 14 aa, Homo sapiens
  Table 3 sequence identifier: Q13439_C1269
  MOD_RES (3)..(3): May or may not be conjugated to a chemical probe
KTCTVSELEAQLRQ

SEQ ID NO: 2968 - protein, 21 aa, Homo sapiens
  Table 3 sequence identifier: P63279_C43
  MOD_RES (14)..(14): May or may not be conjugated to a chemical probe
KNPDGTMNLMNWECAIPGKKG

SEQ ID NO: 2969 - protein, 13 aa, Homo sapiens
  Table 3 sequence identifier: P60900_C47
  MOD_RES (5)..(5): May or may not be conjugated to a chemical probe
RGKDCAVIVTQKK

SEQ ID NO: 2970 - protein, 42 aa, Homo sapiens
  Table 3 sequence identifier: Q9H0L4_C222
  MOD_RES (19)..(19): May or may not be conjugated to a chemical probe
KSQSVSVSGPGPGPGPGLCPGPNVLLNQQNPPAPQPQHLARR

SEQ ID NO: 2971 - protein, 18 aa, Homo sapiens
  Table 3 sequence identifier: Q86UX7_C128
  MOD_RES (16)..(16): May or may not be conjugated to a chemical probe
RASFSQPLFQAVAAICRL

SEQ ID NO: 2972 - protein, 28 aa, Homo sapiens
  Table 3 sequence identifier: Q15003_C714
  MOD_RES (19)..(19): May or may not be conjugated to a chemical probe
RSLPPVMAQNLSIPLAFACLLHLANEKN

SEQ ID NO: 2973 - protein, 12 aa, Homo sapiens
  Table 3 sequence identifier: O60684_C253
  MOD_RES (5)..(5): May or may not be conjugated to a chemical probe
KVSPCLPVLSRL

SEQ ID NO: 2974 - protein, 18 aa, Homo sapiens
  Table 3 sequence identifier: O75643_C1580
  MOD_RES (11)..(11): May or may not be conjugated to a chemical probe
RLTAIDILTTCAADIQRQ

SEQ ID NO: 2975 - protein, 17 aa, Homo sapiens
  Table 3 sequence identifier: O43765_C129
  MOD_RES (14)..(14): May or may not be conjugated to a chemical probe
KAIELNPANAVYFCNRA

SEQ ID NO: 2976 - protein, 38 aa, Homo sapiens
  Table 3 sequence identifier: Q9GZV5_C363
  MOD_RES (8)..(8): May or may not be conjugated to a chemical probe
RFPDFLDCLPGTNVDLGTLESEDLIPLFNDVESALNKS

SEQ ID NO: 2977 - protein, 42 aa, Homo sapiens
  Table 3 sequence identifier: P27816_C654
  MOD_RES (4)..(4): May or may not be conjugated to a chemical probe
RKPCNSQPSELSSETSGIARPEEGRPVVSGTGNDITTPPNKE

SEQ ID NO: 2978 - protein, 12 aa, Homo sapiens
  Table 3 sequence identifier: Q14847_C53
  MOD_RES (5)..(5): May or may not be conjugated to a chemical probe
KKPYCNAHYPKQ

SEQ ID NO: 2979 - protein, 27 aa, Homo sapiens
  Table 3 sequence identifier: O15371_C195
  MOD_RES (13)..(13): May or may not be conjugated to a chemical probe
RYLEVSEPQDIECCGALEYYDKAFDRI

SEQ ID NO: 2980 - protein, 20 aa, Homo sapiens
  Table 3 sequence identifier: P10768_C181
  MOD_RES (15)..(15): May or may not be conjugated to a chemical probe
KSVSAFAPICNPVLCPWGKK

SEQ ID NO: 2981 - protein, 25 aa, Homo sapiens
  Table 3 sequence identifier: P52895_C242
  MOD_RES (20)..(20): May or may not be conjugated to a chemical probe
REEPWVDPNSPVLLEDPVLCALAKK

SEQ ID NO: 2982 - protein, 25 aa, Homo sapiens
  Table 3 sequence identifier: Q9UBE0_C303
  MOD_RES (11)..(11): May or may not be conjugated to a chemical probe
RYCFSEMAPVCAVVGGILAQEIVKA

SEQ ID NO: 2983 - protein, 12 aa, Homo sapiens
  Table 3 sequence identifier: P29590_C204
  MOD_RES (10)..(10): May or may not be conjugated to a chemical probe
RTPTLTSIYCRG

SEQ ID NO: 2984 - protein, 24 aa, Homo sapiens
  Table 3 sequence identifier: O15231_C262
  MOD_RES (7)..(7): May or may not be conjugated to a chemical probe
RAIWIECLPSMPSPAGSQELSSRG

SEQ ID NO: 2985 - protein, 29 aa, Homo sapiens
  Table 3 sequence identifier: O75251_C183
  MOD_RES (12)..(12): May or may not be conjugated to a chemical probe
RIVPVDIYIPGCPPTAEALLYGILQLQRK

SEQ ID NO: 2986 - protein, 11 aa, Homo sapiens
  Table 3 sequence identifier: Q01082_C1900
  MOD_RES (7)..(7): May or may not be conjugated to a chemical probe
KSLLDACESRR

SEQ ID NO: 2987 - protein, 10 aa, Homo sapiens
  Table 3 sequence identifier: Q9UHR5_C127
  MOD_RES (2)..(2): May or may not be conjugated to a chemical probe
RCSNHLQDKI

SEQ ID NO: 2988 - protein, 10 aa, Homo sapiens
  Table 3 sequence identifier: Q9NR56_C43
  MOD_RES (3)..(3): May or may not be conjugated to a chemical probe
KSCQVENGRV

SEQ ID NO: 2989 - protein, 15 aa, Homo sapiens
  Table 3 sequence identifier: Q9P2E9_C892
  MOD_RES (4)..(4): May or may not be conjugated to a chemical probe
RELCHTQSSHASLRA

SEQ ID NO: 2990 - protein, 19 aa, Homo sapiens
  Table 3 sequence identifier: Q9P2E9_C933
  MOD_RES (4)..(4): May or may not be conjugated to a chemical probe
RSKCEELSGLHGQLQEARA

SEQ ID NO: 2991 - protein, 43 aa, Homo sapiens
  Table 3 sequence identifier: Q9P2E9_C1057
  MOD_RES (9)..(9): May or may not be conjugated to a chemical probe
KEESEKQLCLIEAQTMEALLALLPELSVLAQQNYTEWLQDLKE

SEQ ID NO: 2992 - protein, 14 aa, Homo sapiens
  Table 3 sequence identifier: P13640_C38
  MOD_RES (7)..(7): May or may not be conjugated to a chemical probe
KSCCSCCPVGCAKC

SEQ ID NO: 2993 - protein, 38 aa, Homo sapiens
  Table 3 sequence identifier: Q9NSE4_C311
  MOD_RES (31)..(31): May or may not be conjugated to a chemical probe
KLASLIDGSSPVSILVWTTQPWTIPANEAVCYMPESKY

SEQ ID NO: 2994 - protein, 26 aa, Homo sapiens
  Table 3 sequence identifier: Q9Y2X7_C576
  MOD_RES (19)..(19): May or may not be conjugated to a chemical probe
KGVSASAVPFTPSSPLLSCSQEGSRH

SEQ ID NO: 2995 - protein, 29 aa, Homo sapiens
  Table 3 sequence identifier: Q9H840_C44
  MOD_RES (15)..(15): May or may not be conjugated to a chemical probe
RRAPLRPEVPEIQECPIAQESLESQEQRA

SEQ ID NO: 2996 - protein, 16 aa, Homo sapiens
  Table 3 sequence identifier: P14678_C45
  MOD_RES (10)..(10): May or may not be conjugated to a chemical probe
KHMNLILCDCDEFRKI

SEQ ID NO: 2997 - protein, 11 aa, Homo sapiens
  Table 3 sequence identifier: P28340_C428
  MOD_RES (6)..(6): May or may not be conjugated to a chemical probe
RVAGLCSNIRD

SEQ ID NO: 2998 - protein, 39 aa, Homo sapiens
  Table 3 sequence identifier: P28347_C53
  MOD_RES (36)..(36): May or may not be conjugated to a chemical probe
RMSDSADKPIDNDAEGVWSPDIEQSFQEALAIYPPCGRR

SEQ ID NO: 2999 - protein, 10 aa, Homo sapiens
  Table 3 sequence identifier: P32780_C246
  MOD_RES (7)..(7): May or may not be conjugated to a chemical probe
KDLFAECAKI

SEQ ID NO: 3000 - protein, 10 aa, Homo sapiens
  Table 3 sequence identifier: Q86VP6_C71
  MOD_RES (2)..(2): May or may not be conjugated to a chemical probe
KCLGPLVSKV

SEQ ID NO: 3001 - protein, 7 aa, Homo sapiens
  Table 3 sequence identifier: Q92597_C394
  MOD_RES (7)..(7): May or may not be conjugated to a chemical probe
KSMEVSC

SEQ ID NO: 3002 - protein, 19 aa, Homo sapiens
  Table 3 sequence identifier: Q8IW35_C484
  MOD_RES (7)..(7): May or may not be conjugated to a chemical probe
KAGLLPCPEPTIISAILKD

SEQ ID NO: 3003 - protein, 46 aa, Homo sapiens
  Table 3 sequence identifier: Q96JB5_C216
  MOD_RES (33)..(33): May or may not be conjugated to a chemical probe
KDLPSQLAEIGAAAQQSLGEAIDVYQASVGFVCESPTEQVLPMLRF

SEQ ID NO: 3004 - protein, 14 aa, Homo sapiens
  Table 3 sequence identifier: Q96T51_C320
  MOD_RES (5)..(5): May or may not be conjugated to a chemical probe
RHLSCTVGDLQTKI

SEQ ID NO: 3005 - protein, 42 aa, Homo sapiens
  Table 3 sequence identifier: Q13503_C29
  MOD_RES (26)..(26): May or may not be conjugated to a chemical probe
RLTQLQDAVNSLADQFCNAIGVLQQCGPPASFNNIQTAINKD

SEQ ID NO: 3006 - protein, 23 aa, Homo sapiens
  Table 3 sequence identifier: P49721_C46
  MOD_RES (6)..(6): May or may not be conjugated to a chemical probe
KILLLCVGEAGDTVQFAEYIQKN

SEQ ID NO: 3007 - protein, 20 aa, Homo sapiens
  Table 3 sequence identifier: O75376_C2056
  MOD_RES (10)..(10): May or may not be conjugated to a chemical probe
RLITLADHICQIITQDFARN

SEQ ID NO: 3008 - protein, 17 aa, Homo sapiens
  Table 3 sequence identifier: Q86UP2_C1105
  MOD_RES (5)..(5): May or may not be conjugated to a chemical probe
KAKECMAGTSGSEEVKV

SEQ ID NO: 3009 - protein, 17 aa, Homo sapiens
  Table 3 sequence identifier: Q8TB45_C247
  MOD_RES (14)..(14): May or may not be conjugated to a chemical probe
KSPSSQETHDSPFCLRK

SEQ ID NO: 3010 - protein, 18 aa, Homo sapiens
  Table 3 sequence identifier: P41252_C87
  MOD_RES (6)..(6): May or may not be conjugated to a chemical probe
RFGWDCHGLPVEYEIDKT

SEQ ID NO: 3011 - protein, 13 aa, Homo sapiens
  Table 3 sequence identifier: P41252_C120
  MOD_RES (11)..(11): May or may not be conjugated to a chemical probe
KMGITEYNNQCRA

SEQ ID NO: 3012 - protein, 15 aa, Homo sapiens
  Table 3 sequence identifier: P41252_C433
  MOD_RES (6)..(6): May or may not be conjugated to a chemical probe
RNNDLCYWVPELVRE

SEQ ID NO: 3013 - protein, 20 aa, Homo sapiens
  Table 3 sequence identifier: Q06203_C496
  MOD_RES (16)..(16): May or may not be conjugated to a chemical probe
KKHDIMIQENGNGLECFEKS

SEQ ID NO: 3014 - protein, 8 aa, Homo sapiens
  Table 3 sequence identifier: Q15437_C767
  MOD_RES (8)..(8): May or may not be conjugated to a chemical probe
KLAVSSAC

SEQ ID NO: 3015 - protein, 26 aa, Homo sapiens
  Table 3 sequence identifier: Q9NQW6_C71
  MOD_RES (2)..(2): May or may not be conjugated to a chemical probe
RCSDNTEVEVSNLENKQPVESTSAKS

SEQ ID NO: 3016 - protein, 11 aa, Homo sapiens
  Table 3 sequence identifier: Q9UBF6_C61
  MOD_RES (8)..(8): May or may not be conjugated to a chemical probe
RVQVMDACLRC

SEQ ID NO: 3017 - protein, 10 aa, Homo sapiens
  Table 3 sequence identifier: P51649_C110
  MOD_RES (8)..(8): May or may not be conjugated to a chemical probe
RAAYEAFCRW

SEQ ID NO: 3018 - protein, 50 aa, Homo sapiens
  Table 3 sequence identifier: I3L420_C80
  MOD_RES (18)..(18): May or may not be conjugated to a chemical probe
RGSDIKDLTVCEPPKPQCSLPQDPAIVQSSLGSSTSSFQSMGSYGPFGRM

SEQ ID NO: 3019 - protein, 44 aa, Homo sapiens
  Table 3 sequence identifier: Q13263_C88
  MOD_RES (10)..(10): May or may not be conjugated to a chemical probe
RLLPCLHSACSACLGPAAPAAANSSGDGGAAGDGTVVDCPVCKQ

SEQ ID NO: 3020 - protein, 9 aa, Homo sapiens
  Table 3 sequence identifier: Q5VTU8_C19
  MOD_RES (6)..(6): May or may not be conjugated to a chemical probe
RYSQICAKA

SEQ ID NO: 3021 - protein, 10 aa, Homo sapiens
  Table 3 sequence identifier: P06733_C337
  MOD_RES (3)..(3): May or may not be conjugated to a chemical probe
KSCNCLLLKV

SEQ ID NO: 3022 - protein, 33 aa, Homo sapiens
  Table 3 sequence identifier: P08559_C94
  MOD_RES (7)..(7): May or may not be conjugated to a chemical probe
RGFCHLCDGQEACCVGLEAGINPTDHLITAYRA

SEQ ID NO: 3023 - protein, 28 aa, Homo sapiens
  Table 3 sequence identifier: Q14166_C642
  MOD_RES (26)..(26): May or may not be conjugated to a chemical probe
RYHPTFFNDVFSTLFLDQPGGCHVTCLV

SEQ ID NO: 3024 - protein, 27 aa, Homo sapiens
  Table 3 sequence identifier: Q9BW92_C506
  MOD_RES (16)..(16): May or may not be conjugated to a chemical probe
RLALSTRPSGFLGDPCLWDQAEQVLKQ

SEQ ID NO: 3025 - protein, 33 aa, Homo sapiens
  Table 3 sequence identifier: Q12824_C223
  MOD_RES (13)..(13): May or may not be conjugated to a chemical probe
KLMTPEMFSEILCDDLDLNPLTFVPAIASAIRQ

SEQ ID NO: 3026 - protein, 17 aa, Homo sapiens
  Table 3 sequence identifier: O00410_C733
  MOD_RES (14)..(14): May or may not be conjugated to a chemical probe
RVAAAESMPLLLECARV

SEQ ID NO: 3027 - protein, 25 aa, Homo sapiens
  Table 3 sequence identifier: Q9BXV9_C21
  MOD_RES (4)..(4): May or may not be conjugated to a chemical probe
RVSCEAPGDGDPFQGLLSGVAQMKD

SEQ ID NO: 3028 - protein, 11 aa, Homo sapiens
  Table 3 sequence identifier: Q53GG5_C77
  MOD_RES (8)..(8): May or may not be conjugated to a chemical probe
KAAAHQLCLKI

SEQ ID NO: 3029 - protein, 22 aa, Homo sapiens
  Table 3 sequence identifier: P36776_C858
  MOD_RES (8)..(8): May or may not be conjugated to a chemical probe
KDGPSAGCTIVTALLSLAMGRP

SEQ ID NO: 3030 - protein, 25 aa, Homo sapiens
  Table 3 sequence identifier: Q16531_C652
  MOD_RES (11)..(11): May or may not be conjugated to a chemical probe
RSLSTTNVFACSDRPTVIYSSNHKL

SEQ ID NO: 3031 - protein, 49 aa, Homo sapiens
  Table 3 sequence identifier: Q96PZ0_C38
  MOD_RES (26)..(26): May or may not be conjugated to a chemical probe
RGALVVEDNDSGVPVEETKKQKLSECSLTKGQDGLQNDFLSISEDVPRP

SEQ ID NO: 3032 - protein, 16 aa, Homo sapiens
  Table 3 sequence identifier: Q9HBM6_C121
  MOD_RES (8)..(8): May or may not be conjugated to a chemical probe
RLPPDRYCLTAPNYRL

SEQ ID NO: 3033 - protein, 15 aa, Homo sapiens
  Table 3 sequence identifier: A0AVT1_C625
  MOD_RES (11)..(11): May or may not be conjugated to a chemical probe
RDPPEEEIPFCTLKS

SEQ ID NO: 3034 - protein, 20 aa, Homo sapiens
  Table 3 sequence identifier: P53384_C31
  MOD_RES (3)..(3): May or may not be conjugated to a chemical probe
RLCASGAGATPDTAIEEIKE

SEQ ID NO: 3035 - protein, 27 aa, Homo sapiens
  Table 3 sequence identifier: Q8TBE9_C242
  MOD_RES (25)..(25): May or may not be conjugated to a chemical probe
KSSPVPHYMVSSVLELPALLQSIDCKV

SEQ ID NO: 3036 - protein, 13 aa, Homo sapiens
  Table 3 sequence identifier: P10644_C362
  MOD_RES (6)..(6): May or may not be conjugated to a chemical probe
RVLGPCSDILKRN

SEQ ID NO: 3037 - protein, 12 aa, Homo sapiens
  Table 3 sequence identifier: P49790_C1065
  MOD_RES (10)..(10): May or may not be conjugated to a chemical probe
KSASVAPFTCKT

SEQ ID NO: 3038 - protein, 11 aa, Homo sapiens
  Table 3 sequence identifier: Q00610_C617
  MOD_RES (8)..(8): May or may not be conjugated to a chemical probe
RAHIAQLCEKA

SEQ ID NO: 3039 - protein, 11 aa, Homo sapiens
  Table 3 sequence identifier: Q00610_C753
  MOD_RES (5)..(5): May or may not be conjugated to a chemical probe
RESNCYDPERV

SEQ ID NO: 3040 - protein, 18 aa, Homo sapiens
  Table 3 sequence identifier: O00506_C357
  MOD_RES (4)..(4): May or may not be conjugated to a chemical probe
RSQCLSTLVRPVFGELKE

SEQ ID NO: 3041 - protein, 25 aa, Homo sapiens
  Table 3 sequence identifier: Q6SJ93_C523
  MOD_RES (10)..(10): May or may not be conjugated to a chemical probe
KVTFTYTEFCPTPDNWFSIEPWLKV

SEQ ID NO: 3042 - protein, 12 aa, Homo sapiens
  Table 3 sequence identifier: Q01581_C86
  MOD_RES (8)..(8): May or may not be conjugated to a chemical probe
RNNLSYDCIGRL

SEQ ID NO: 3043 - protein, 35 aa, Homo sapiens
  Table 3 sequence identifier: P35658_C917
  MOD_RES (29)..(29): May or may not be conjugated to a chemical probe
KQTSLWSLSSAVPSQSSIHSFDSDLESLCNALLKT

SEQ ID NO: 3044 - protein, 13 aa, Homo sapiens
  Table 3 sequence identifier: P46013_C958
  MOD_RES (2)..(2): May or may not be conjugated to a chemical probe
KCAPMSDLTDLKS

SEQ ID NO: 3045 - protein, 9 aa, Homo sapiens
  Table 3 sequence identifier: Q14005_C975
  MOD_RES (5)..(5): May or may not be conjugated to a chemical probe
RSQSCETKL

SEQ ID NO: 3046 - protein, 11 aa, Homo sapiens
  Table 3 sequence identifier: P40937_C73
  MOD_RES (8)..(8): May or may not be conjugated to a chemical probe
KTSTILACAKQ

SEQ ID NO: 3047 - protein, 9 aa, Homo sapiens
  Table 3 sequence identifier: Q14653_C371
  MOD_RES (6)..(6): May or may not be conjugated to a chemical probe
KVVPTCLRA

SEQ ID NO: 3048 - protein, 20 aa, Homo sapiens
  Table 3 sequence identifier: P07900_C420
  MOD_RES (3)..(3): May or may not be conjugated to a chemical probe
KKCLELFTELAEDKENYKKF

SEQ ID NO: 3049 - protein, 23 aa, Homo sapiens
  Table 3 sequence identifier: P21333_C649
  MOD_RES (16)..(16): May or may not be conjugated to a chemical probe
RYWPQEAGEYAVHVLCNSEDIRL

SEQ ID NO: 3050 - protein, 28 aa, Homo sapiens
  Table 3 sequence identifier: P21333_C1260
  MOD_RES (15)..(15): May or may not be conjugated to a chemical probe
KLQVEPAVDTSGVQCYGPGIEGQGVFRE

SEQ ID NO: 3051 - protein, 19 aa, Homo sapiens
  Table 3 sequence identifier: P21333_C2160
  MOD_RES (13)..(13): May or may not be conjugated to a chemical probe
RRAPSVANVGSHCDLSLKI

SEQ ID NO: 3052 - protein, 12 aa, Homo sapiens
  Table 3 sequence identifier: Q7Z3D6_C265
  MOD_RES (6)..(6): May or may not be conjugated to a chemical probe
KAPPGCLTPERI

SEQ ID NO: 3053 - protein, 11 aa, Homo sapiens
  Table 3 sequence identifier: O00264_C129
  MOD_RES (7)..(7): May or may not be conjugated to a chemical probe
RGLATFCLDKE

SEQ ID NO: 3054 - protein, 15 aa, Homo sapiens
  Table 3 sequence identifier: Q15345_C123
  MOD_RES (12)..(12): May or may not be conjugated to a chemical probe
KTRPSSLESVTCWRA

SEQ ID NO: 3055 - protein, 10 aa, Homo sapiens
  Table 3 sequence identifier: P43490_C397
  MOD_RES (6)..(6): May or may not be conjugated to a chemical probe
RDLLNCSFKC

SEQ ID NO: 3056 - protein, 26 aa, Homo sapiens
  Table 3 sequence identifier: O43504_C66
  MOD_RES (13)..(13): May or may not be conjugated to a chemical probe
KLTSDPTDIPVVCLESDNGNIMIQKH

SEQ ID NO: 3057 - protein, 10 aa, Homo sapiens
  Table 3 sequence identifier: P48307_C130
  MOD_RES (7)..(7): May or may not be conjugated to a chemical probe
KFFSGGCHRN

SEQ ID NO: 3058 - protein, 10 aa, Homo sapiens
  Table 3 sequence identifier: P18074_C663
  MOD_RES (6)..(6): May or may not be conjugated to a chemical probe
RHAAQCVGRA

SEQ ID NO: 3059 - protein, 16 aa, Homo sapiens
  Table 3 sequence identifier: Q9NV35_C23
  MOD_RES (14)..(14): May or may not be conjugated to a chemical probe
RRPGVGVGVVVTSCKH

SEQ ID NO: 3060 - protein, 29 aa, Homo sapiens
  Table 3 sequence identifier: Q12888_C896
  MOD_RES (14)..(14): May or may not be conjugated to a chemical probe
KLGKPSAHASQSFCESSSETPFHFTLPKE

SEQ ID NO: 3061 - protein, 22 aa, Homo sapiens
  Table 3 sequence identifier: Q8TAC2_C168
  MOD_RES (13)..(13): May or may not be conjugated to a chemical probe
RAFLAAALAQGLCEVLLVVTKE

SEQ ID NO: 3062 - protein, 14 aa, Homo sapiens
  Table 3 sequence identifier: Q6P1L8_C90
  MOD_RES (8)..(8): May or may not be conjugated to a chemical probe
KALIVGHCMPGPRM

SEQ ID NO: 3063 - protein, 33 aa, Homo sapiens
  Table 3 sequence identifier: Q92576_C441
  MOD_RES (24)..(24): May or may not be conjugated to a chemical probe
KSNLEVVDTSTFGPESNILENAICDVPDQNSKQ

SEQ ID NO: 3064 - protein, 16 aa, Homo sapiens
  Table 3 sequence identifier: P63000_C105
  MOD_RES (4)..(4): May or may not be conjugated to a chemical probe
RHHCPNTPIILVGTKL

SEQ ID NO: 3065 - protein, 17 aa, Homo sapiens
  Table 3 sequence identifier: O94776_C261
  MOD_RES (15)..(15): May or may not be conjugated to a chemical probe
KAMSTLVPQGGPVLCRD

SEQ ID NO: 3066 - protein, 24 aa, Homo sapiens
  Table 3 sequence identifier: Q9P0K7_C131
  MOD_RES (12)..(12): May or may not be conjugated to a chemical probe
KTALHYAAAQGCLQAVQILCEHKS

SEQ ID NO: 3067 - protein, 25 aa, Homo sapiens
  Table 3 sequence identifier: Q92747_C162
  MOD_RES (21)..(21): May or may not be conjugated to a chemical probe
RSTVLSLDWHPNNVLLAAGSCDFKC

SEQ ID NO: 3068 - protein, 16 aa, Homo sapiens
  Table 3 sequence identifier: Q8NE71_C741
  MOD_RES (14)..(14): May or may not be conjugated to a chemical probe
RFGLESHAHTIQICKL

SEQ ID NO: 3069 - protein, 23 aa, Homo sapiens
  Table 3 sequence identifier: P58546_C45
  MOD_RES (10)..(10): May or may not be conjugated to a chemical probe
RKPLHYAADCGQLEILEFLLLKG

SEQ ID NO: 3070 - protein, 16 aa, Homo sapiens
  Table 3 sequence identifier: Q10570_C1044
  MOD_RES (13)..(13): May or may not be conjugated to a chemical probe
KVYAVATSTNTPCARI

SEQ ID NO: 3071 - protein, 26 aa, Homo sapiens
  Table 3 sequence identifier: Q15021_C320
  MOD_RES (11)..(11): May or may not be conjugated to a chemical probe
RVPAILMSSMCILLDHLDGENYMMRN

SEQ ID NO: 3072 - protein, 40 aa, Homo sapiens
  Table 3 sequence identifier: Q6P1N0_C252
  MOD_RES (28)..(28): May or may not be conjugated to a chemical probe
RVTLEGPSATAPASSPGLAKPQMPPGPCSPGPLAQLQSRQ

SEQ ID NO: 3073 - protein, 35 aa, Homo sapiens
  Table 3 sequence identifier: O43818_C399
  MOD_RES (32)..(32): May or may not be conjugated to a chemical probe
RGEPGLEQPFWISSVAALLNTDLVATGSHSSCVRL

SEQ ID NO: 3074 - protein, 13 aa, Homo sapiens
  Table 3 sequence identifier: Q92556_C726
  MOD_RES (12)..(12): May or may not be conjugated to a chemical probe
KEPSNYDFVYDCN

SEQ ID NO: 3075 - protein, 10 aa, Homo sapiens
  Table 3 sequence identifier: Q9NSP4_C110
  MOD_RES (5)..(5): May or may not be conjugated to a chemical probe
RESHCSIHRH

SEQ ID NO: 3076 - protein, 31 aa, Homo sapiens
  Table 3 sequence identifier: P22234_C151
  MOD_RES (3)..(3): May or may not be conjugated to a chemical probe
KFCFAGLLIGQTEVDIMSHATQAIFEILEKS

SEQ ID NO: 3077 - protein, 23 aa, Homo sapiens
  Table 3 sequence identifier: Q96RN5_C698
  MOD_RES (11)..(11): May or may not be conjugated to a chemical probe
KFLVNLDPSHCSNNGTVHLICKL

SEQ ID NO: 3078 - protein, 20 aa, Homo sapiens
  Table 3 sequence identifier: Q8IWZ3_C181
  MOD_RES (8)..(8): May or may not be conjugated to a chemical probe
RLTSSVSCALDEAAAALTRM

SEQ ID NO: 3079 - protein, 12 aa, Homo sapiens
  Table 3 sequence identifier: H3BN98_C109
  MOD_RES (6)..(6): May or may not be conjugated to a chemical probe
RFHEICSNLVKT

SEQ ID NO: 3080 - protein, 33 aa, Homo sapiens
  Table 3 sequence identifier: Q14683_C1115
  MOD_RES (26)..(26): May or may not be conjugated to a chemical probe
RNSSAQAFLGPENPEEPYLDGINYNCVAPGKRF

SEQ ID NO: 3081 - protein, 11 aa, Homo sapiens
  Table 3 sequence identifier: P33764_C99
  MOD_RES (9)..(9): May or may not be conjugated to a chemical probe
KDCPSEPPCSQ

SEQ ID NO: 3082 - protein, 14 aa, Homo sapiens
  Table 3 sequence identifier: Q8NF50_C143
  MOD_RES (9)..(9): May or may not be conjugated to a chemical probe
KNQGSPEICGFKKT

SEQ ID NO: 3083 - protein, 15 aa, Homo sapiens
  Table 3 sequence identifier: Q9NZT2_C87
  MOD_RES (3)..(3): May or may not be conjugated to a chemical probe
RDCNGDTPNLSFYRN

SEQ ID NO: 3084 - protein, 19 aa, Homo sapiens
  Table 3 sequence identifier: Q13620_C248
  MOD_RES (15)..(15): May or may not be conjugated to a chemical probe
KYNLEELYQAVENLCSYKI

SEQ ID NO: 3085 - protein, 44 aa, Homo sapiens
  Table 3 sequence identifier: P00505_C187
  MOD_RES (3)..(3): May or may not be conjugated to a chemical probe
KTCGFDFTGAVEDISKIPEQSVLLLHACAHNPTGVDPRPEQWKE

SEQ ID NO: 3086 - protein, 18 aa, Homo sapiens
  Table 3 sequence identifier: Q9Y262_C417
  MOD_RES (15)..(15): May or may not be conjugated to a chemical probe
KGDPQVYEELFSYSCPKF

SEQ ID NO: 3087 - protein, 26 aa, Homo sapiens
  Table 3 sequence identifier: O75521_C282
  MOD_RES (18)..(18): May or may not be conjugated to a chemical probe
RATFHTPFSHLGQSPEGCSSYTFPKI

SEQ ID NO: 3088 - protein, 16 aa, Homo sapiens
  Table 3 sequence identifier: Q01469_C120
  MOD_RES (6)..(6): May or may not be conjugated to a chemical probe
KLVVECVMNNVTCTRI

SEQ ID NO: 3089 - protein, 24 aa, Homo sapiens
  Table 3 sequence identifier: O14965_C33
  MOD_RES (10)..(10): May or may not be conjugated to a chemical probe
RVLVTQQFPCQNPLPVNSGQAQRV

SEQ ID NO: 3090 - protein, 22 aa, Homo sapiens
  Table 3 sequence identifier: P24844_C109
  MOD_RES (6)..(6): May or may not be conjugated to a chemical probe
RNAFACFDEEASGFIHEDHLRE

SEQ ID NO: 3091 - protein, 27 aa, Homo sapiens
  Table 3 sequence identifier: Q9ULT8_C2415
  MOD_RES (22)..(22): May or may not be conjugated to a chemical probe
KNPSGSGPPLSIEDLGLNFQFCPSSRI

SEQ ID NO: 3092 - protein, 12 aa, Homo sapiens
  Table 3 sequence identifier: P81877_C82
  MOD_RES (4)..(4): May or may not be conjugated to a chemical probe
RETCEHSSEAKA

SEQ ID NO: 3093 - protein, 12 aa, Homo sapiens
  Table 3 sequence identifier: Q9UJX3_C329
  MOD_RES (10)..(10): May or may not be conjugated to a chemical probe
RLEDVENLGCRL

SEQ ID NO: 3094 - protein, 15 aa, Homo sapiens
  Table 3 sequence identifier: Q9BW19_C663
  MOD_RES (5)..(5): May or may not be conjugated to a chemical probe
KVNQCVIGTAQANRK

SEQ ID NO: 3095 - protein, 22 aa, Homo sapiens
  Table 3 sequence identifier: P51553_C333
  MOD_RES (14)..(14): May or may not be conjugated to a chemical probe
KNIANPTATLLASCMMLDHLKL

SEQ ID NO: 3096 - protein, 19 aa, Homo sapiens
  Table 3 sequence identifier: P32320_C53
  MOD_RES (3)..(3): May or may not be conjugated to a chemical probe
KGCNIENACYPLGICAERT

SEQ ID NO: 3097 - protein, 31 aa, Homo sapiens
  Table 3 sequence identifier: Q02750_C376
  MOD_RES (14)..(14): May or may not be conjugated to a chemical probe
RSDAEEVDFAGWLCSTIGLNQPSTPTHAAGV

SEQ ID NO: 3098 - protein, 21 aa, Homo sapiens
  Table 3 sequence identifier: O94829_C163
  MOD_RES (2)..(2): May or may not be conjugated to a chemical probe
RCLALLELLTVLPEEFQTSRL

SEQ ID NO: 3099 - protein, 13 aa, Homo sapiens
  Table 3 sequence identifier: Q9UNH7_C149
  MOD_RES (11)..(11): May or may not be conjugated to a chemical probe
KTVAMHEVFLCRV

SEQ ID NO: 3100 - protein, 13 aa, Homo sapiens
  Table 3 sequence identifier: Q9UQ80_C149
  MOD_RES (6)..(6): May or may not be conjugated to a chemical probe
KAAHLCAEAALRL

SEQ ID NO: 3101 - protein, 13 aa, Homo sapiens
  Table 3 sequence identifier: P13674_C503
  MOD_RES (5)..(5): May or may not be conjugated to a chemical probe
RHAACPVLVGNKW

SEQ ID NO: 3102 - protein, 21 aa, Homo sapiens
  Table 3 sequence identifier: O95239_C153
  MOD_RES (17)..(17): May or may not be conjugated to a chemical probe
KVSYLEIYNEEILDLLCPSRE

SEQ ID NO: 3103 - protein, 11 aa, Homo sapiens
  Table 3 sequence identifier: P08134_C20
  MOD_RES (3)..(3): May or may not be conjugated to a chemical probe
KTCLLIVFSKD

SEQ ID NO: 3104 - protein, 23 aa, Homo sapiens
  Table 3 sequence identifier: P15121_C45
  MOD_RES (5)..(5): May or may not be conjugated to a chemical probe
RHIDCAHVYQNENEVGVAIQEKL

SEQ ID NO: 3105 - protein, 18 aa, Homo sapiens
  Table 3 sequence identifier: P42704_C208
  MOD_RES (7)..(7): May or may not be conjugated to a chemical probe
RLIASYCNVGDIEGASKI

SEQ ID NO: 3106 - protein, 10 aa, Homo sapiens
  Table 3 sequence identifier: Q9BYV9_C370
  MOD_RES (5)..(5): May or may not be conjugated to a chemical probe
RSPACPFDKG

SEQ ID NO: 3107 - protein, 18 aa, Homo sapiens
  Table 3 sequence identifier: Q9P0V9_C22
  MOD_RES (4)..(4): May or may not be conjugated to a chemical probe
KTTCMSSQGSDDEQIKRE

SEQ ID NO: 3108 - protein, 11 aa, Homo sapiens
  Table 3 sequence identifier: P51570_C203
  MOD_RES (9)..(9): May or may not be conjugated to a chemical probe
KGHALLIDCRS

SEQ ID NO: 3109 - protein, 17 aa, Homo sapiens
  Table 3 sequence identifier: Q7Z5L9_C37
  MOD_RES (15)..(15): May or may not be conjugated to a chemical probe
RMPWAMIWDFTEPVCRG

SEQ ID NO: 3110 - protein, 10 aa, Homo sapiens
  Table 3 sequence identifier: Q86VP6_C1007
  MOD_RES (3)..(3): May or may not be conjugated to a chemical probe
KNCIGDFLKT

SEQ ID NO: 3111 - protein, 15 aa, Homo sapiens
  Table 3 sequence identifier: Q6KB66_C244
  MOD_RES (2)..(2): May or may not be conjugated to a chemical probe
RCHIDLSGIVEEVKA

SEQ ID NO: 3112 - protein, 9 aa, Homo sapiens
  Table 3 sequence identifier: P17980_C240
  MOD_RES (3)..(3): May or may not be conjugated to a chemical probe
RACAAQTKA

SEQ ID NO: 3113 - protein, 28 aa, Homo sapiens
  Table 3 sequence identifier: P13797_C566
  MOD_RES (20)..(20): May or may not be conjugated to a chemical probe
KTISSSLAVVDLIDAIQPGCINYDLVKS

SEQ ID NO: 3114 - protein, 36 aa, Homo sapiens
  Table 3 sequence identifier: Q15599_C271
  MOD_RES (32)..(32): May or may not be conjugated to a chemical probe
RVTPTEEHVEGPLPSPVTNGTSPAQLNGGSACSSRS

SEQ ID NO: 3115 - protein, 10 aa, Homo sapiens
  Table 3 sequence identifier: P41134_C45
  MOD_RES (2)..(2): May or may not be conjugated to a chemical probe
RCAGGAGARL

SEQ ID NO: 3116 - protein, 15 aa, Homo sapiens
  Table 3 sequence identifier: Q06210_C264
  MOD_RES (7)..(7): May or may not be conjugated to a chemical probe
RVDSTTCLFPVEEKA

SEQ ID NO: 3117 - protein, 22 aa, Homo sapiens
  Table 3 sequence identifier: P12694_C178
  MOD_RES (12)..(12): May or may not be conjugated to a chemical probe
RDYPLELFMAQCYGNISDLGKG

SEQ ID NO: 3118 - protein, 34 aa, Homo sapiens
  Table 3 sequence identifier: Q5XKP0_C60
  MOD_RES (18)..(18): May or may not be conjugated to a chemical probe
KAGEVVPPAMYQFSQYVCQQTGLQIPQLPAPPKI

SEQ ID NO: 3119 - protein, 16 aa, Homo sapiens
  Table 3 sequence identifier: Q9UMS4_C298
  MOD_RES (10)..(10): May or may not be conjugated to a chemical probe
RIWSVPNASCVQVVRA

SEQ ID NO: 3120 - protein, 11 aa, Homo sapiens
  Table 3 sequence identifier: Q9H2U2_C44
  MOD_RES (5)..(5): May or may not be conjugated to a chemical probe
RGQPCSQNYRL

SEQ ID NO: 3121 - protein, 21 aa, Homo sapiens
  Table 3 sequence identifier: Q9H2U2_C283
  MOD_RES (2)..(2): May or may not be conjugated to a chemical probe
KCNGGAINCTNVQISDSPFRC

SEQ ID NO: 3122 - protein, 16 aa, Homo sapiens
  Table 3 sequence identifier: Q68CZ2_C615
  MOD_RES (2)..(2): May or may not be conjugated to a chemical probe
RCPADNPGLVQAQPRV

SEQ ID NO: 3123 - protein, 11 aa, Homo sapiens
  Table 3 sequence identifier: Q99933_C272
  MOD_RES (9)..(9): May or may not be conjugated to a chemical probe
KDLQAEALCKL

SEQ ID NO: 3124 - protein, 9 aa, Homo sapiens
  Table 3 sequence identifier: Q86U42_C205
  MOD_RES (6)..(6): May or may not be conjugated to a chemical probe
RVTILCDKF

SEQ ID NO: 3125 - protein, 22 aa, Homo sapiens
  Table 3 sequence identifier: Q14141_C42
  MOD_RES (8)..(8): May or may not be conjugated to a chemical probe
KSVSQGFCFNILCVGETGLGKS

SEQ ID NO: 3126 - protein, 11 aa, Homo sapiens
  Table 3 sequence identifier: Q9H4B0_C390
  MOD_RES (2)..(2): May or may not be conjugated to a chemical probe
KCPLGVDISKE

SEQ ID NO: 3127 - protein, 11 aa, Homo sapiens
  Table 3 sequence identifier: P13796_C140
  MOD_RES (9)..(9): May or may not be conjugated to a chemical probe
KALENDPDCRH

SEQ ID NO: 3128 - protein, 18 aa, Homo sapiens
  Table 3 sequence identifier: Q06330_C397
  MOD_RES (2)..(2): May or may not be conjugated to a chemical probe
RCGESMLCVVPDISAFRE

SEQ ID NO: 3129 - protein, 14 aa, Homo sapiens
  Table 3 sequence identifier: Q6NVY1_C45
  MOD_RES (3)..(3): May or may not be conjugated to a chemical probe
KGCTGVITLNRPKF

SEQ ID NO: 3130 - protein, 32 aa, Homo sapiens
  Table 3 sequence identifier: Q9BYB4_C175
  MOD_RES (7)..(7): May or may not be conjugated to a chemical probe
RLWQADCSSRPLLLAGYEDGSVVLWDVSEQKV

SEQ ID NO: 3131 - protein, 21 aa, Homo sapiens
  Table 3 sequence identifier: P43681_C225
  MOD_RES (5)..(5): May or may not be conjugated to a chemical probe
RKYECCAEIYPDITYAFVIRR

SEQ ID NO: 3132 - protein, 27 aa, Homo sapiens
  Table 3 sequence identifier: Q9Y490_C2408
  MOD_RES (11)..(11): May or may not be conjugated to a chemical probe
RMVAAATNNLCEAANAAVQGHASQEKL

SEQ ID NO: 3133 - protein, 28 aa, Homo sapiens
  Table 3 sequence identifier: P39748_C163
  MOD_RES (22)..(22): May or may not be conjugated to a chemical probe
KHLLSLMGIPYLDAPSEAEASCAALVKA

SEQ ID NO: 3134 - protein, 29 aa, Homo sapiens
  Table 3 sequence identifier: P49137_C224
  MOD_RES (13)..(13): May or may not be conjugated to a chemical probe
KETTSHNSLTTPCYTPYYVAPEVLGPEKY

SEQ ID NO: 3135 - protein, 40 aa, Homo sapiens
  Table 3 sequence identifier: O96013_C276
  MOD_RES (25)..(25): May or may not be conjugated to a chemical probe
RARGAPSPGVLGPHASEPQLAPPACTPAAPAVPGPPGPRS

SEQ ID NO: 3136 - protein, 13 aa, Homo sapiens
  Table 3 sequence identifier: P49748_C477
  MOD_RES (9)..(9): May or may not be conjugated to a chemical probe
RLFVALQGCMDKG

SEQ ID NO: 3137 - protein, 19 aa, Homo sapiens
  Table 3 sequence identifier: Q7Z4W1_C244
  MOD_RES (19)..(19): May or may not be conjugated to a chemical probe
RSGMTTGSTLPVEGGFWAC

SEQ ID NO: 3138 - protein, 13 aa, Homo sapiens
  Table 3 sequence identifier: P33992_C355
  MOD_RES (5)..(5): May or may not be conjugated to a chemical probe
KAIACLLFGGSRK

SEQ ID NO: 3139 - protein, 16 aa, Homo sapiens
  Table 3 sequence identifier: A6NHR9_C59
  MOD_RES (3)..(3): May or may not be conjugated to a chemical probe
RACVCQTLGISPEEKF

SEQ ID NO: 3140 - protein, 15 aa, Homo sapiens
  Table 3 sequence identifier: O15460_C529
  MOD_RES (9)..(9): May or may not be conjugated to a chemical probe
RGQEFLRPCGSTEVD

SEQ ID NO: 3141 - protein, 24 aa, Homo sapiens
  Table 3 sequence identifier: Q12824_C350
  MOD_RES (10)..(10): May or may not be conjugated to a chemical probe
RNTGDADQWCPLLETLTDAEMEKK

SEQ ID NO: 3142 - protein, 33 aa, Homo sapiens
  Table 3 sequence identifier: O00410_C944
  MOD_RES (23)..(23): May or may not be conjugated to a chemical probe
RQAAAYGLGVMAQYGGDNYRPFCTEALPLLVRV

SEQ ID NO: 3143 - protein, 20 aa, Homo sapiens
  Table 3 sequence identifier: Q96CP2_C64
  MOD_RES (5)..(5): May or may not be conjugated to a chemical probe
KGVHCVMSLGVPGPATLAKA

SEQ ID NO: 3144 - protein, 16 aa, Homo sapiens
  Table 3 sequence identifier: Q15080_C84
  MOD_RES (7)..(7): May or may not be conjugated to a chemical probe
KSSALACTLPTLPAKV

SEQ ID NO: 3145 - protein, 38 aa, Homo sapiens
  Table 3 sequence identifier: Q02241_C483
  MOD_RES (24)..(24): May or may not be conjugated to a chemical probe
RGPVGNEPLVTDVVLQSFPPLPSCEILDINDEQTLPRL

SEQ ID NO: 3146 - protein, 36 aa, Homo sapiens
  Table 3 sequence identifier: Q9NSV4_C102
  MOD_RES (9)..(9): May or may not be conjugated to a chemical probe
KTAFASSDCSAAPLEMMENFPKPLSENELLELFEKM

SEQ ID NO: 3147 - protein, 14 aa, Homo sapiens
  Table 3 sequence identifier: Q96N67_C1944
  MOD_RES (5)..(5): May or may not be conjugated to a chemical probe
RFMYCTPFTLDGRA

SEQ ID NO: 3148 - protein, 35 aa, Homo sapiens
  Table 3 sequence identifier: P16885_C1200
  MOD_RES (33)..(33): May or may not be conjugated to a chemical probe
KNGYSEDIELASLLVFCEMRPVLESEEELYSSCRQ

SEQ ID NO: 3149 - protein, 31 aa, Homo sapiens
  Table 3 sequence identifier: Q15366_C301
  MOD_RES (26)..(26): May or may not be conjugated to a chemical probe
KGYWGLDASAQTTSHELTIPNDLIGCIIGRQ

SEQ ID NO: 3150 - protein, 27 aa, Homo sapiens
  Table 3 sequence identifier: Q92598_C290
  MOD_RES (16)..(16): May or may not be conjugated to a chemical probe
KLMSSNSTDLPLNIECFMNDKDVSGKM

SEQ ID NO: 3151 - protein, 24 aa, Homo sapiens
  Table 3 sequence identifier: P53384_C277
  MOD_RES (3)..(3): May or may not be conjugated to a chemical probe
KNCDKGQSFFIDAPDSPATLAYRS

SEQ ID NO: 3152 - protein, 9 aa, Homo sapiens
  Table 3 sequence identifier: Q15181_C254
  MOD_RES (2)..(2): May or may not be conjugated to a chemical probe
KCDPDAARA

SEQ ID NO: 3153 - protein, 13 aa, Homo sapiens
  Table 3 sequence identifier: Q7Z5K2_C344
  MOD_RES (7)..(7): May or may not be conjugated to a chemical probe
KKGGVSCGTSFRG

SEQ ID NO: 3154 - protein, 26 aa, Homo sapiens
  Table 3 sequence identifier: Q7Z5K2_C906
  MOD_RES (7)..(7): May or may not be conjugated to a chemical probe
RAEDSICLADSKPLPHQNVTNHVGKA

SEQ ID NO: 3155 - protein, 21 aa, Homo sapiens
  Table 3 sequence identifier: Q8NFC6_C285
  MOD_RES (10)..(10): May or may not be conjugated to a chemical probe
KSEEFSDLPCPVEEIKNYTKE

SEQ ID NO: 3156 - protein, 22 aa, Homo sapiens
  Table 3 sequence identifier: P53634_C258
  MOD_RES (9)..(9): May or may not be conjugated to a chemical probe
RNQASCGSCYSFASMGMLEARI

SEQ ID NO: 3157 - protein, 11 aa, Homo sapiens
  Table 3 sequence identifier: Q96G25_C31
  MOD_RES (9)..(9): May or may not be conjugated to a chemical probe
KNSLGSFICKL

SEQ ID NO: 3158 - protein, 21 aa, Homo sapiens
  Table 3 sequence identifier: P10644_C39
  MOD_RES (8)..(8): May or may not be conjugated to a chemical probe
KDSIVQLCTARPERPMAFLRE

SEQ ID NO: 3159 - protein, 31 aa, Homo sapiens
  Table 3 sequence identifier: O00273_C38
  MOD_RES (23)..(23): May or may not be conjugated to a chemical probe
RTLKPCLLRRNYSREQHGVAASCLEDLRSKA

SEQ ID NO: 3160 - protein, 8 aa, Homo sapiens
  Table 3 sequence identifier: P49792_C2577
  MOD_RES (3)..(3): May or may not be conjugated to a chemical probe
KKCELSKN

SEQ ID NO: 3161 - protein, 29 aa, Homo sapiens
  Table 3 sequence identifier: P49792_C2791
  MOD_RES (27)..(27): May or may not be conjugated to a chemical probe
KSQTEEITSTTDSVYTGGTEVMVPSFCKS

SEQ ID NO: 3162 - protein, 22 aa, Homo sapiens
  Table 3 sequence identifier: Q93009_C961
  MOD_RES (14)..(14): May or may not be conjugated to a chemical probe
KIIGVHQEDELLECLSPATSRT

SEQ ID NO: 3163 - protein, 15 aa, Homo sapiens
  Table 3 sequence identifier: Q00610_C491
  MOD_RES (5)..(5): May or may not be conjugated to a chemical probe
KVIQCFAETGQVQKI

SEQ ID NO: 3164 - protein, 16 aa, Homo sapiens
  Table 3 sequence identifier: O60547_C92
  MOD_RES (12)..(12): May or may not be conjugated to a chemical probe
KLHYGDLTDSTCLVKI

SEQ ID NO: 3165 - protein, 12 aa, Homo sapiens
  Table 3 sequence identifier: Q9H0P0_C73
  MOD_RES (7)..(7): May or may not be conjugated to a chemical probe
RVEEIICGLIKG

SEQ ID NO: 3166 - protein, 21 aa, Homo sapiens
  Table 3 sequence identifier: O75427_C105
  MOD_RES (2)..(2): May or may not be conjugated to a chemical probe
RCLNPALGNLTALTYLNLSRN

SEQ ID NO: 3167 - protein, 10 aa, Homo sapiens
  Table 3 sequence identifier: Q4G0N4_C58
  MOD_RES (6)..(6): May or may not be conjugated to a chemical probe
RELAGCGSRA

SEQ ID NO: 3168 - protein, 34 aa, Homo sapiens
  Table 3 sequence identifier: Q9Y4P8_C393
  MOD_RES (20)..(20): May or may not be conjugated to a chemical probe
RLDGSLETTNEILDSASHDCPLVTQTYGAAAGKG

SEQ ID NO: 3169 - protein, 12 aa, Homo sapiens
  Table 3 sequence identifier: P27695_C65
  MOD_RES (3)..(3): May or may not be conjugated to a chemical probe
KICSWNVDGLRA

SEQ ID NO: 3170 - protein, 15 aa, Homo sapiens
  Table 3 sequence identifier: Q15004_C99
  MOD_RES (3)..(3): May or may not be conjugated to a chemical probe
KACPLQPDHTNDEKE

SEQ ID NO: 3171 - protein, 32 aa, Homo sapiens
  Table 3 sequence identifier: P17858_C114
  MOD_RES (16)..(16): May or may not be conjugated to a chemical probe
RAAAYNLVQHGITNLCVIGGDGSLTGANIFRS

SEQ ID NO: 3172 - protein, 32 aa, Homo sapiens
  Table 3 sequence identifier: P17858_C334
  MOD_RES (20)..(20): May or may not be conjugated to a chemical probe
KMGMEAVMALLEATPDTPACVVTLSGNQSVRL

SEQ ID NO: 3173 - protein, 18 aa, Homo sapiens
  Table 3 sequence identifier: Q96PK6_C90
  MOD_RES (11)..(11): May or may not be conjugated to a chemical probe
KIFVGNVSAACTSQELRS

SEQ ID NO: 3174 - protein, 18 aa, Homo sapiens
  Table 3 sequence identifier: Q09028_C167
  MOD_RES (12)..(12): May or may not be conjugated to a chemical probe
KHPSKPDPSGECNPDLRL

SEQ ID NO: 3175 - protein, 18 aa, Homo sapiens
  Table 3 sequence identifier: Q8TC07_C24
  MOD_RES (15)..(15): May or may not be conjugated to a chemical probe
KIIYEQEGVYIHSSCGKT

SEQ ID NO: 3176 - protein, 12 aa, Homo sapiens
  Table 3 sequence identifier: Q7Z6Z7_C2721
  MOD_RES (7)..(7): May or may not be conjugated to a chemical probe
RDQSAQCTASKS

SEQ ID NO: 3177 - protein, 11 aa, Homo sapiens
  Table 3 sequence identifier: Q9H6S3_C369
  MOD_RES (5)..(5): May or may not be conjugated to a chemical probe
RSVSCPLLSRD

SEQ ID NO: 3178 - protein, 10 aa, Homo sapiens
  Table 3 sequence identifier: Q9Y281_C80
  MOD_RES (8)..(8): May or may not be conjugated to a chemical probe
KLLPLNDCRY

SEQ ID NO: 3179 - protein, 21 aa, Homo sapiens
  Table 3 sequence identifier: Q96IZ6_C171
  MOD_RES (8)..(8): May or may not be conjugated to a chemical probe
KISDLEICADEFPGSSATYRI

SEQ ID NO: 3180 - protein, 19 aa, Homo sapiens
  Table 3 sequence identifier: Q96EM0_C39
  MOD_RES (7)..(7): May or may not be conjugated to a chemical probe
RIVLAGCPEVSGPTLLAKR

SEQ ID NO: 3181 - protein, 13 aa, Homo sapiens
  Table 3 sequence identifier: Q92616_C2255
  MOD_RES (9)..(9): May or may not be conjugated to a chemical probe
KGEHVPGFCLPKK

SEQ ID NO: 3182 - protein, 26 aa, Homo sapiens
  Table 3 sequence identifier: P43490_C401
  MOD_RES (2)..(2): May or may not be conjugated to a chemical probe
KCSYVVTNGLGINVFKDPVADPNKRS

SEQ ID NO: 3183 - protein, 22 aa, Homo sapiens
  Table 3 sequence identifier: P22087_C268
  MOD_RES (4)..(4): May or may not be conjugated to a chemical probe
KANCIDSTASAEAVFASEVKKM

SEQ ID NO: 3184 - protein, 16 aa, Homo sapiens
  Table 3 sequence identifier: Q92503_C644
  MOD_RES (8)..(8): May or may not be conjugated to a chemical probe
KFHSMPACAASSLPRV

SEQ ID NO: 3185 - protein, 23 aa, Homo sapiens
  Table 3 sequence identifier: Q9UI10_C69
  MOD_RES (16)..(16): May or may not be conjugated to a chemical probe
KGAEPETGSAVSAAQCQVGPTRE

SEQ ID NO: 3186 - protein, 53 aa, Homo sapiens
  Table 3 sequence identifier: P49327_C161
  MOD_RES (11)..(11): May or may not be conjugated to a chemical probe
RGPSIALDTACSSSLMALQNAYQAIHSGQCPAAIVGGINVLLKPNTSVQFLRL

SEQ ID NO: 3187 - protein, 13 aa, Homo sapiens
  Table 3 sequence identifier: P49327_C1141
  MOD_RES (11)..(11): May or may not be conjugated to a chemical probe
RAALQEELQLCKG

SEQ ID NO: 3188 - protein, 16 aa, Homo sapiens
  Table 3 sequence identifier: P49327_C1227
  MOD_RES (3)..(3): May or may not be conjugated to a chemical probe
KACLDTAVENMPSLKM

SEQ ID NO: 3189 - protein, 15 aa, Homo sapiens
  Table 3 sequence identifier: Q9ULZ3_C173
  MOD_RES (13)..(13): May or may not be conjugated to a chemical probe
KLFSFTPAWNWTCKD

SEQ ID NO: 3190 - protein, 13 aa, Homo sapiens
  Table 3 sequence identifier: Q8WUI4_C904
  MOD_RES (5)..(5): May or may not be conjugated to a chemical probe
RLASCPDSWVPRV

SEQ ID NO: 3191 - protein, 53 aa, Homo sapiens
  Table 3 sequence identifier: Q7L2J0_C324
  MOD_RES (15)..(15): May or may not be conjugated to a chemical probe
RDAPQPYELNTAINCRDEVVSPLPSALQGPSGSLSAPPAASVISAPPSSSSRH

SEQ ID NO: 3192 - protein, 20 aa, Homo sapiens
  Table 3 sequence identifier: Q9BUK6_C46
  MOD_RES (13)..(13): May or may not be conjugated to a chemical probe
RATDSKEPPGELCPDVLYRT

SEQ ID NO: 3193 - protein, 14 aa, Homo sapiens
  Table 3 sequence identifier: P54577_C424
  MOD_RES (7)..(7): May or may not be conjugated to a chemical probe
RLVVVLCNLKPQKM

SEQ ID NO: 3194 - protein, 10 aa, Homo sapiens
  Table 3 sequence identifier: Q8WU90_C105
  MOD_RES (5)..(5): May or may not be conjugated to a chemical probe
KSVVCAFFKQ

SEQ ID NO: 3195 - protein, 26 aa, Homo sapiens
  Table 3 sequence identifier: Q9Y305_C194
  MOD_RES (13)..(13): May or may not be conjugated to a chemical probe
KMQMFQLHGDEFCPVLDATFVMVARD

SEQ ID NO: 3196 - protein, 27 aa, Homo sapiens
  Table 3 sequence identifier: Q15149_C1098
  MOD_RES (6)..(6): May or may not be conjugated to a chemical probe
REYGSCSHHYQQLLQSLEQGAQEESRC

SEQ ID NO: 3197 - protein, 24 aa, Homo sapiens
  Table 3 sequence identifier: Q14669_C535
  MOD_RES (7)..(7): May or may not be conjugated to a chemical probe
KLQVIQCIDVAEQALTALEMLSRR

SEQ ID NO: 3198 - protein, 18 aa, Homo sapiens
  Table 3 sequence identifier: Q9BTT0_C123
  MOD_RES (8)..(8): May or may not be conjugated to a chemical probe
KSLDLFNCEITNLEDYRE

SEQ ID NO: 3199 - protein, 25 aa, Homo sapiens
  Table 3 sequence identifier: Q92989_C338
  MOD_RES (11)..(11): May or may not be conjugated to a chemical probe
KVGAPTIPDSCLPLGMSQEDNQLKL

SEQ ID NO: 3200 - protein, 12 aa, Homo sapiens
  Table 3 sequence identifier: P06132_C59
  MOD_RES (10)..(10): May or may not be conjugated to a chemical probe
RAAQDFFSTCRS

SEQ ID NO: 3201 - protein, 22 aa, Homo sapiens
  Table 3 sequence identifier: Q96EY7_C139
  MOD_RES (10)..(10): May or may not be conjugated to a chemical probe
KDIAEPHIPCLMPEYFEPQIKD

SEQ ID NO: 3202 - protein, 10 aa, Homo sapiens
  Table 3 sequence identifier: P78527_C90
  MOD_RES (4)..(4): May or may not be conjugated to a chemical probe
KFLCIFLEKM

SEQ ID NO: 3203 - protein, 31 aa, Homo sapiens
  Table 3 sequence identifier: P78527_C1312
  MOD_RES (21)..(21): May or may not be conjugated to a chemical probe
KAVAFFLESIAMHDIIAAEKCFGTGAAGNRT

SEQ ID NO: 3204 - protein, 25 aa, Homo sapiens
  Table 3 sequence identifier: P78527_C1767
  MOD_RES (23)..(23): May or may not be conjugated to a chemical probe
KFLDALELSQSPMLLELMTEVLCRE

SEQ ID NO: 3205 - protein, 10 aa, Homo sapiens
  Table 3 sequence identifier: Q92747_C279
  MOD_RES (3)..(3): May or may not be conjugated to a chemical probe
RGCLTFVSKL

SEQ ID NO: 3206 - protein, 27 aa, Homo sapiens
  Table 3 sequence identifier: Q14671_C234
  MOD_RES (24)..(24): May or may not be conjugated to a chemical probe
RSESGGLGVSMVEYVLSSSPGDSCLRK

SEQ ID NO: 3207 - protein, 15 aa, Homo sapiens
  Table 3 sequence identifier: O60216_C585
  MOD_RES (13)..(13): May or may not be conjugated to a chemical probe
KTGAESISLLELCRN

SEQ ID NO: 3208 - protein, 10 aa, Homo sapiens
  Table 3 sequence identifier: Q5VZF2_C19
  MOD_RES (8)..(8): May or may not be conjugated to a chemical probe
KWLTLEVCRQ

SEQ ID NO: 3209 - protein, 17 aa, Homo sapiens
  Table 3 sequence identifier: Q9UEW8_C525
  MOD_RES (6)..(6): May or may not be conjugated to a chemical probe
KLASGCDGSEIPDEVKL

SEQ ID NO: 3210 - protein, 16 aa, Homo sapiens
  Table 3 sequence identifier: O00232_C255
  MOD_RES (8)..(8): May or may not be conjugated to a chemical probe
RAIYDTPCIQAESEKW

SEQ ID NO: 3211 - protein, 13 aa, Homo sapiens
  Table 3 sequence identifier: O00233_C81
  MOD_RES (6)..(6): May or may not be conjugated to a chemical probe
RHNIICLQNDHKA

SEQ ID NO: 3212 - protein, 33 aa, Homo sapiens
  Table 3 sequence identifier: Q5GLZ8_C392
  MOD_RES (27)..(27): May or may not be conjugated to a chemical probe
RIFSGGDQSFSHYSSPQNCGPPDDFRCPNPTKQ

SEQ ID NO: 3213 - protein, 22 aa, Homo sapiens
  Table 3 sequence identifier: O14579_C212
  MOD_RES (2)..(2): May or may not be conjugated to a chemical probe
KCSPTLLLLNGQAACHMAQGRW

SEQ ID NO: 3214 - protein, 13 aa, Homo sapiens
  Table 3 sequence identifier: Q7Z4G1_C35
  MOD_RES (11)..(11): May or may not be conjugated to a chemical probe
KLGMAVSSDTCRS

SEQ ID NO: 3215 - protein, 12 aa, Homo sapiens
  Table 3 sequence identifier: P17812_C218
  MOD_RES (2)..(2): May or may not be conjugated to a chemical probe
RCSNPLDTSVKE

SEQ ID NO: 3216 - protein, 12 aa, Homo sapiens
  Table 3 sequence identifier: O95394_C200
  MOD_RES (5)..(5): May or may not be conjugated to a chemical probe
KQASCSGDEYRS

SEQ ID NO: 3217 - protein, 11 aa, Homo sapiens
  Table 3 sequence identifier: Q7LBC6_C1357
  MOD_RES (3)..(3): May or may not be conjugated to a chemical probe
RACNLTDTQKE

SEQ ID NO: 3218 - protein, 13 aa, Homo sapiens
  Table 3 sequence identifier: Q99496_C72
  MOD_RES (3)..(3): May or may not be conjugated to a chemical probe
RFCADCIITALRS

SEQ ID NO: 3219 - protein, 9 aa, Homo sapiens
  Table 3 sequence identifier: Q9UNW1_C232
  MOD_RES (6)..(6): May or may not be conjugated to a chemical probe
RFFDHCEKF

SEQ ID NO: 3220 - protein, 13 aa, Homo sapiens
  Table 3 sequence identifier: P50453_C259
  MOD_RES (10)..(10): May or may not be conjugated to a chemical probe
KLTAWTKPDCMKS

SEQ ID NO: 3221 - protein, 18 aa, Homo sapiens
  Table 3 sequence identifier: Q9NZT2_C417
  MOD_RES (9)..(9): May or may not be conjugated to a chemical probe
KIALNLEGCALSQGSLRT

SEQ ID NO: 3222 - protein, 17 aa, Homo sapiens
  Table 3 sequence identifier: O95573_C450
  MOD_RES (5)..(5): May or may not be conjugated to a chemical probe
RLLLCGGAPLSATTQRF

SEQ ID NO: 3223 - protein, 32 aa, Homo sapiens
  Table 3 sequence identifier: O60841_C720
  MOD_RES (6)..(6): May or may not be conjugated to a chemical probe
RGSSLCDIAILVVDIMHGLEPQTIESINLLKS

SEQ ID NO: 3224 - protein, 14 aa, Homo sapiens
  Table 3 sequence identifier: P29317_C612
  MOD_RES (10)..(10): May or may not be conjugated to a chemical probe
KFTTEIHPSCVTRQ

SEQ ID NO: 3225 - protein, 16 aa, Homo sapiens
  Table 3 sequence identifier: O14561_C140
  MOD_RES (4)..(4): May or may not be conjugated to a chemical probe
KLMCPQEIVDYIADKK

SEQ ID NO: 3226 - protein, 30 aa, Homo sapiens
  Table 3 sequence identifier: Q9NXH9_C639
  MOD_RES (10)..(10): May or may not be conjugated to a chemical probe
RVSADAAPDCPETSNQTPPGPGAAAGPGID

SEQ ID NO: 3227 - protein, 25 aa, Homo sapiens
  Table 3 sequence identifier: Q9H6Y2_C306
  MOD_RES (22)..(22): May or may not be conjugated to a chemical probe
RVVGSVGQHTGEPVEELALSHCGRF

SEQ ID NO: 3228 - protein, 13 aa, Homo sapiens
  Table 3 sequence identifier: A0JLT2_C163
  MOD_RES (11)..(11): May or may not be conjugated to a chemical probe
RLHTGPLPEQCRL

SEQ ID NO: 3229 - protein, 50 aa, Homo sapiens
  Table 3 sequence identifier: Q10567_C565
  MOD_RES (28)..(28): May or may not be conjugated to a chemical probe
KEVVLAEKPLISEETDLIEPTLLDELICYIGTLASVYHKPPSAFVEGGRG

SEQ ID NO: 3230 - protein, 27 aa, Homo sapiens
  Table 3 sequence identifier: P08243_C115
  MOD_RES (9)..(9): May or may not be conjugated to a chemical probe
KGGIEQTICMLDGVFAFVLLDTANKKV

SEQ ID NO: 3231 - protein, 17 aa, Homo sapiens
  Table 3 sequence identifier: P08243_C158
  MOD_RES (12)..(12): May or may not be conjugated to a chemical probe
KAMTEDGFLAVCSEAKG

SEQ ID NO: 3232 - protein, 22 aa, Homo sapiens
  Table 3 sequence identifier: P46736_C273
  MOD_RES (4)..(4): May or may not be conjugated to a chemical probe
KNLCSQMSAVSGPLLQWLEDRL

SEQ ID NO: 3233 - protein, 13 aa, Homo sapiens
  Table 3 sequence identifier: Q01469_C67
  MOD_RES (7)..(7): May or may not be conjugated to a chemical probe
KTTQFSCTLGEKF

SEQ ID NO: 3234 - protein, 30 aa, Homo sapiens
  Table 3 sequence identifier: O43175_C116
  MOD_RES (26)..(26): May or may not be conjugated to a chemical probe
KGILVMNTPNGNSLSAAELTCGMIMCLARQ

SEQ ID NO: 3235 - protein, 11 aa, Homo sapiens
  Table 3 sequence identifier: O14818_C91
  MOD_RES (6)..(6): May or may not be conjugated to a chemical probe
RARVECQSHRL

SEQ ID NO: 3236 - protein, 20 aa, Homo sapiens
  Table 3 sequence identifier: Q9BRA2_C110
  MOD_RES (7)..(7): May or may not be conjugated to a chemical probe
KLVESECLQANLVEMLFSED

SEQ ID NO: 3237 - protein, 26 aa, Homo sapiens
  Table 3 sequence identifier: P01892_C363
  MOD_RES (24)..(24): May or may not be conjugated to a chemical probe
KGGSYSQAASSDSAQGSDVSLTACKV

SEQ ID NO: 3238 - protein, 30 aa, Homo sapiens
  Table 3 sequence identifier: P84085_C159
  MOD_RES (9)..(9): May or may not be conjugated to a chemical probe
RTWYVQATCATQGTGLYDGLDWLSHELSKR

SEQ ID NO: 3239 - protein, 14 aa, Homo sapiens
  Table 3 sequence identifier: P62879_C204
  MOD_RES (8)..(8): May or may not be conjugated to a chemical probe
RTFVSGACDASIKL

SEQ ID NO: 3240 - protein, 34 aa, Homo sapiens
  Table 3 sequence identifier: Q9C0C9_C244
  MOD_RES (6)..(6): May or may not be conjugated to a chemical probe
KLYDVCPHVSDSGLFFDDSYGFYPGQVLIGPAKI

SEQ ID NO: 3241 - protein, 23 aa, Homo sapiens
  Table 3 sequence identifier: Q9C0C9_C598
  MOD_RES (5)..(5): May or may not be conjugated to a chemical probe
RVQSCPDPAVYGVVQSGDHIGRT

SEQ ID NO: 3242 - protein, 22 aa, Homo sapiens
  Table 3 sequence identifier: Q14204_C3573
  MOD_RES (13)..(13): May or may not be conjugated to a chemical probe
RWQASSLPADDLCTENAIMLKR

SEQ ID NO: 3243 - protein, 13 aa, Homo sapiens
  Table 3 sequence identifier: O60684_C238
  MOD_RES (11)..(11): May or may not be conjugated to a chemical probe
RNAVWALSNLCRG

SEQ ID NO: 3244 - protein, 18 aa, Homo sapiens
  Table 3 sequence identifier: P20073_C413
  MOD_RES (6)..(6): May or may not be conjugated to a chemical probe
KTILQCALNRPAFFAERL

SEQ ID NO: 3245 - protein, 11 aa, Homo sapiens
  Table 3 sequence identifier: O75643_C1127
  MOD_RES (7)..(7): May or may not be conjugated to a chemical probe
RMWQSMCPLRQ

SEQ ID NO: 3246 - protein, 24 aa, Homo sapiens
  Table 3 sequence identifier: P32320_C31
  MOD_RES (6)..(6): May or may not be conjugated to a chemical probe
KKSAYCPYSHFPVGAALLTQEGRI

SEQ ID NO: 3247 - protein, 29 aa, Homo sapiens
  Table 3 sequence identifier: P11586_C236
  MOD_RES (14)..(14): May or may not be conjugated to a chemical probe
KGEWIKPGAIVIDCGINYVPDDKKPNGRK

SEQ ID NO: 3248 - protein, 12 aa, Homo sapiens
  Table 3 sequence identifier: H3BN57_C113
  MOD_RES (10)..(10): May or may not be conjugated to a chemical probe
RLQAANDSVCRL

SEQ ID NO: 3249 - protein, 11 aa, Homo sapiens
  Table 3 sequence identifier: Q53HC9_C95
  MOD_RES (5)..(5): May or may not be conjugated to a chemical probe
KVLTCAAVWRM

SEQ ID NO: 3250 - protein, 46 aa, Homo sapiens
  Table 3 sequence identifier: P27816_C67
  MOD_RES (5)..(5): May or may not be conjugated to a chemical probe
KKKPCSETSQIEDTPSSKPTLLANGGHGVEGSDTTGSPTEFLEEKM

SEQ ID NO: 3251 - protein, 19 aa, Homo sapiens
  Table 3 sequence identifier: P84090_C33
  MOD_RES (17)..(17): May or may not be conjugated to a chemical probe
RTYADYESVNECMEGVCKM

SEQ ID NO: 3252 - protein, 29 aa, Homo sapiens
  Table 3 sequence identifier: O00487_C299
  MOD_RES (18)..(18): May or may not be conjugated to a chemical probe
RHLEEHVDVLMTSNIVQCLAAMLDTVVFK

SEQ ID NO: 3253 - protein, 10 aa, Homo sapiens
  Table 3 sequence identifier: Q8N8R5_C43
  MOD_RES (2)..(2): May or may not be conjugated to a chemical probe
RCSLSAEVRR

SEQ ID NO: 3254 - protein, 13 aa, Homo sapiens
  Table 3 sequence identifier: P52948_C1027
  MOD_RES (9)..(9): May or may not be conjugated to a chemical probe
KADTSQEICSPRL

SEQ ID NO: 3255 - protein, 19 aa, Homo sapiens
  Table 3 sequence identifier: P52948_C1068
  MOD_RES (17)..(17): May or may not be conjugated to a chemical probe
KFTSGAFLSPSVSVQECRT

SEQ ID NO: 3256 - protein, 25 aa, Homo sapiens
  Table 3 sequence identifier: Q4G0P3_C1853
  MOD_RES (4)..(4): May or may not be conjugated to a chemical probe
KNPCNFPIEFYSLEFDQQYLIEEKI

SEQ ID NO: 3257 - protein, 13 aa, Homo sapiens
  Table 3 sequence identifier: Q08J23_C502
  MOD_RES (5)..(5): May or may not be conjugated to a chemical probe
KDGVCGPPPSKKM

SEQ ID NO: 3258 - protein, 40 aa, Homo sapiens
  Table 3 sequence identifier: O15231_C542
  MOD_RES (8)..(8): May or may not be conjugated to a chemical probe
RVRSPSSCMVTVTVTATSEQPHIYIPAPASELDSSSTTKG

SEQ ID NO: 3259 - protein, 12 aa, Homo sapiens
  Table 3 sequence identifier: P21291_C122
  MOD_RES (2)..(2): May or may not be conjugated to a chemical probe
RCSQAVYAAEKV

SEQ ID NO: 3260 - protein, 29 aa, Homo sapiens
  Table 3 sequence identifier: O43447_C122
  MOD_RES (20)..(20): May or may not be conjugated to a chemical probe
RHSAPGLLSMANSGPSTNGCQFFITCSKC

SEQ ID NO: 3261 - protein, 34 aa, Homo sapiens
  Table 3 sequence identifier: P08237_C170
  MOD_RES (19)..(19): May or may not be conjugated to a chemical probe
KSSYLNIVGLVGSIDNDFCGTDMTIGTDSALHRI

SEQ ID NO: 3262 - protein, 33 aa, Homo sapiens
  Table 3 sequence identifier: Q1KMD3_C602
  MOD_RES (10)..(10): May or may not be conjugated to a chemical probe
KANFSLPEKCDYMDEVTYGELEKEEAQPIVTKY

SEQ ID NO: 3263 - protein, 25 aa, Homo sapiens
  Table 3 sequence identifier: P51991_C94
  MOD_RES (19)..(19): May or may not be conjugated to a chemical probe
RGFGFVTYSCVEEVDAAMCARPHKV

SEQ ID NO: 3264 - protein, 23 aa, Homo sapiens
  Table 3 sequence identifier: P35237_C36
  MOD_RES (12)..(12): May or may not be conjugated to a chemical probe
KNVFFSPMSMSCALAMVYMGAKG

SEQ ID NO: 3265 - protein, 24 aa, Homo sapiens
  Table 3 sequence identifier: Q96FJ2_C24
  MOD_RES (16)..(16): May or may not be conjugated to a chemical probe
KNADMSEDMQQDAVDCATQAMEKY

SEQ ID NO: 3266 - protein, 12 aa, Homo sapiens
  Table 3 sequence identifier: Q9BTZ2_C209
  MOD_RES (4)..(4): May or may not be conjugated to a chemical probe
RVNCLAPGLIKT

SEQ ID NO: 3267 - protein, 30 aa, Homo sapiens
  Table 3 sequence identifier: Q9UMS4_C230
  MOD_RES (23)..(23): May or may not be conjugated to a chemical probe
RQVASHVGLHSASIPGILALDLCPSDTNKI

SEQ ID NO: 3268 - protein, 51 aa, Homo sapiens
  Table 3 sequence identifier: Q9Y6A5_C459
  MOD_RES (22)..(22): May or may not be conjugated to a chemical probe
RLGQPAAEQLHAGPATEEPGPCLSQQLHSASAEDTPVVQLAAETPTAESKE

SEQ ID NO: 3269 - protein, 21 aa, Homo sapiens
  Table 3 sequence identifier: Q86TI0_C604
  MOD_RES (12)..(12): May or may not be conjugated to a chemical probe
RANTLSHFPIECQEPPQPARG

SEQ ID NO: 3270 - protein, 23 aa, Homo sapiens
  Table 3 sequence identifier: Q9H0W9_C226
  MOD_RES (12)..(12): May or may not be conjugated to a chemical probe
KSHIMPAEFSSCPLNSDEEVNKW

SEQ ID NO: 3271 - protein, 13 aa, Homo sapiens
  Table 3 sequence identifier: P18031_C121
  MOD_RES (2)..(2): May or may not be conjugated to a chemical probe
KCAQYWPQKEEKE

SEQ ID NO: 3272 - protein, 11 aa, Homo sapiens
  Table 3 sequence identifier: O60343_C1286
  MOD_RES (5)..(5): May or may not be conjugated to a chemical probe
RDLNCNPNNKA

SEQ ID NO: 3273 - protein, 51 aa, Homo sapiens
  Table 3 sequence identifier: O60759_C210
  MOD_RES (23)..(23): May or may not be conjugated to a chemical probe
KWVEYRSLQLQEHRLLHGDAANCPSLENMDLDELSLFGPLPGPGPALVDRN

SEQ ID NO: 3274 - protein, 23 aa, Homo sapiens
  Table 3 sequence identifier: P10398_C192
  MOD_RES (5)..(5): May or may not be conjugated to a chemical probe
RTQHCDPEHFPFPAPANAPLQRI

SEQ ID NO: 3275 - protein, 30 aa, Homo sapiens
  Table 3 sequence identifier: Q71SY5_C111
  MOD_RES (10)..(10): May or may not be conjugated to a chemical probe
KFMGGGGESCSLIAEGLSTALQLFDDFKKM

SEQ ID NO: 3276 - protein, 29 aa, Homo sapiens
  Table 3 sequence identifier: Q9Y490_C1392
  MOD_RES (19)..(19): May or may not be conjugated to a chemical probe
RELLENPVQPINDMSYFGCLDSVMENSKV

SEQ ID NO: 3277 - protein, 8 aa, Homo sapiens
  Table 3 sequence identifier: P43246_C873
  MOD_RES (3)..(3): May or may not be conjugated to a chemical probe
KKCYLERE

SEQ ID NO: 3278 - protein, 20 aa, Homo sapiens
  Table 3 sequence identifier: P23381_C305
  MOD_RES (6)..(6): May or may not be conjugated to a chemical probe
RTDIQCLIPCAIDQDPYFRM

SEQ ID NO: 3279 - protein, 19 aa, Homo sapiens
  Table 3 sequence identifier: Q9NXV2_C28
  MOD_RES (2)..(2): May or may not be conjugated to a chemical probe
RCSAGLGALAQRPGSVSKW

SEQ ID NO: 3280 - protein, 12 aa, Homo sapiens
  Table 3 sequence identifier: P21399_C369
  MOD_RES (6)..(6): May or may not be conjugated to a chemical probe
KTVVPCCSGPKR

SEQ ID NO: 3281 - protein, 27 aa, Homo sapiens
  Table 3 sequence identifier: Q06830_C52
  MOD_RES (16)..(16): May or may not be conjugated to a chemical probe
KYVVFFFYPLDFTFVCPTEIIAFSDRA

SEQ ID NO: 3282 - protein, 29 aa, Homo sapiens
  Table 3 sequence identifier: Q96D46_C20
  MOD_RES (11)..(11): May or may not be conjugated to a chemical probe
RSPGHILCCECGVPISPNPANICVACLRS

SEQ ID NO: 3283 - protein, 15 aa, Homo sapiens
  Table 3 sequence identifier: Q9Y6C9_C79
  MOD_RES (3)..(3): May or may not be conjugated to a chemical probe
RLCSGVLGTVVHGKV

SEQ ID NO: 3284 - protein, 17 aa, Homo sapiens
  Table 3 sequence identifier: O00429_C446
  MOD_RES (6)..(6): May or may not be conjugated to a chemical probe
RIIQHCSNYSTQELLRF

SEQ ID NO: 3285 - protein, 17 aa, Homo sapiens
  Table 3 sequence identifier: P50552_C64
  MOD_RES (12)..(12): May or may not be conjugated to a chemical probe
KMQPDQQVVINCAIVRG

SEQ ID NO: 3286 - protein, 23 aa, Homo sapiens
  Table 3 sequence identifier: Q00796_C120
  MOD_RES (11)..(11): May or may not be conjugated to a chemical probe
RYNLSPSIFFCATPPDDGNLCRF

SEQ ID NO: 3287 - protein, 26 aa, Homo sapiens
  Table 3 sequence identifier: P42126_C114
  MOD_RES (23)..(23): May or may not be conjugated to a chemical probe
RGVILTSDRPGVFSAGLDLTEMCGRS

SEQ ID NO: 3288 - protein, 15 aa, Homo sapiens
  Table 3 sequence identifier: P49368_C213
  MOD_RES (11)..(11): May or may not be conjugated to a chemical probe
KIPGGIIEDSCVLRG

SEQ ID NO: 3289 - protein, 11 aa, Homo sapiens
  Table 3 sequence identifier: Q9NY27_C105
  MOD_RES (3)..(3): May or may not be conjugated to a chemical probe
RLCELLTDPRR

SEQ ID NO: 3290 - protein, 24 aa, Homo sapiens
  Table 3 sequence identifier: P49756_C83
  MOD_RES (9)..(9): May or may not be conjugated to a chemical probe
KAKENDENCGPTTTVFVGNISEKA

SEQ ID NO: 3291 - protein, 11 aa, Homo sapiens
  Table 3 sequence identifier: F5H5P2_C231
  MOD_RES (9)..(9): May or may not be conjugated to a chemical probe
RQMPVHYGCKE

SEQ ID NO: 3292 - protein, 22 aa, Homo sapiens
  Table 3 sequence identifier: Q14C86_C741
  MOD_RES (8)..(8): May or may not be conjugated to a chemical probe
RLQELESCSGLGSTSDDTDVRE

SEQ ID NO: 3293 - protein, 23 aa, Homo sapiens
  Table 3 sequence identifier: Q969V6_C326
  MOD_RES (18)..(18): May or may not be conjugated to a chemical probe
RSLSTTNSSSSSGAPGPCGLARQ

SEQ ID NO: 3294 - protein, 24 aa, Homo sapiens
  Table 3 sequence identifier: Q9P2N5_C21
  MOD_RES (7)..(7): May or may not be conjugated to a chemical probe
KLLEPICDADPSALANYVVALVKK

SEQ ID NO: 3295 - protein, 12 aa, Homo sapiens
  Table 3 sequence identifier: P53396_C229
  MOD_RES (10)..(10): May or may not be conjugated to a chemical probe
KVDATADYICKV

SEQ ID NO: 3296 - protein, 31 aa, Homo sapiens
  Table 3 sequence identifier: Q8WVT3_C160
  MOD_RES (24)..(24): May or may not be conjugated to a chemical probe
REVPGSEAARPEQEPPVAEPVPVCTIFSQRA

SEQ ID NO: 3297 - protein, 8 aa, Homo sapiens
  Table 3 sequence identifier: O43678_C24
  MOD_RES (5)..(5): May or may not be conjugated to a chemical probe
RIHLCQRS

SEQ ID NO: 3298 - protein, 16 aa, Homo sapiens
  Table 3 sequence identifier: Q96IF1_C270
  MOD_RES (10)..(10): May or may not be conjugated to a chemical probe
RHSVTGYGDCAVGARY

SEQ ID NO: 3299 - protein, 37 aa, Homo sapiens
  Table 3 sequence identifier: Q14974_C158
  MOD_RES (12)..(12): May or may not be conjugated to a chemical probe
KESTLEAIGYICQDIDPEQLQDKSNEILTAIIQGMRK

SEQ ID NO: 3300 - protein, 11 aa, Homo sapiens
  Table 3 sequence identifier: P21266_C178
  MOD_RES (2)..(2): May or may not be conjugated to a chemical probe
KCLDEFPNLKA

SEQ ID NO: 3301 - protein, 10 aa, Homo sapiens
  Table 3 sequence identifier: O00622_C322
  MOD_RES (2)..(2): May or may not be conjugated to a chemical probe
RCCTPQLTRT

SEQ ID NO: 3302 - protein, 13 aa, Homo sapiens
  Table 3 sequence identifier: Q96N67_C193
  MOD_RES (6)..(6): May or may not be conjugated to a chemical probe
RGSWACSIFDLKN

SEQ ID NO: 3303 - protein, 10 aa, Homo sapiens
  Table 3 sequence identifier: Q15369_C74
  MOD_RES (3)..(3): May or may not be conjugated to a chemical probe
KVCMYFTYKV

SEQ ID NO: 3304 - protein, 42 aa, Homo sapiens
  Table 3 sequence identifier: A6NDU8_C57
  MOD_RES (3)..(3): May or may not be conjugated to a chemical probe
KECSNPSNLLELYTQAILDMTYFEENKLVDEDFPEDSSSQKV

SEQ ID NO: 3305 - protein, 13 aa, Homo sapiens
  Table 3 sequence identifier: Q9P219_C1871
  MOD_RES (6)..(6): May or may not be conjugated to a chemical probe
KAGSSCQGPGPRS

SEQ ID NO: 3306 - protein, 9 aa, Homo sapiens
  Table 3 sequence identifier: Q09161_C73
  MOD_RES (4)..(4): May or may not be conjugated to a chemical probe
RLLCTVARL

SEQ ID NO: 3307 - protein, 12 aa, Homo sapiens
  Table 3 sequence identifier: Q69YN2_C141
  MOD_RES (5)..(5): May or may not be conjugated to a chemical probe
RMMLCTTSQFKG

SEQ ID NO: 3308 - protein, 22 aa, Homo sapiens
  Table 3 sequence identifier: Q70E73_C1045
  MOD_RES (17)..(17): May or may not be conjugated to a chemical probe
KLNLSGVNLPGVLQQGCVSAKA

SEQ ID NO: 3309 - protein, 11 aa, Homo sapiens
  Table 3 sequence identifier: Q93008_C1237
  MOD_RES (7)..(7): May or may not be conjugated to a chemical probe
RYMPDICVIRA

SEQ ID NO: 3310 - protein, 38 aa, Homo sapiens
  Table 3 sequence identifier: Q9UQ13_C144
  MOD_RES (11)..(11): May or may not be conjugated to a chemical probe
KLQSLPAEVGCLVNLMTLALSENSLTSLPDSLDNLKKL

SEQ ID NO: 3311 - protein, 24 aa, Homo sapiens
  Table 3 sequence identifier: Q9BXP5_C715
  MOD_RES (17)..(17): May or may not be conjugated to a chemical probe
KFVTSNTQELGKDKWLCPLSGKKF

SEQ ID NO: 3312 - protein, 25 aa, Homo sapiens
  Table 3 sequence identifier: Q96P65_C201
  MOD_RES (13)..(13): May or may not be conjugated to a chemical probe
KYDFLYEKEHICCLEEWTSPVHQKI

SEQ ID NO: 3313 - protein, 10 aa, Homo sapiens
  Table 3 sequence identifier: P46013_C261
  MOD_RES (8)..(8): May or may not be conjugated to a chemical probe
KENVLQYCRK

SEQ ID NO: 3314 - protein, 21 aa, Homo sapiens
  Table 3 sequence identifier: P17858_C630
  MOD_RES (2)..(2): May or may not be conjugated to a chemical probe
KCHDYYTTEFLYNLYSSEGKG

SEQ ID NO: 3315 - protein, 32 aa, Homo sapiens
  Table 3 sequence identifier: O75083_C285
  MOD_RES (27)..(27): May or may not be conjugated to a chemical probe
KIWDVSVNSVVSTFPMGSTVLDQQLGCLWQKD

SEQ ID NO: 3316 - protein, 29 aa, Homo sapiens
  Table 3 sequence identifier: O43252_C78
  MOD_RES (14)..(14): May or may not be conjugated to a chemical probe
KTTVSMALEEYLVCHGIPCYTLDGDNIRQ

SEQ ID NO: 3317 - protein, 13 aa, Homo sapiens
  Table 3 sequence identifier: Q6WCQ1_C724
  MOD_RES (10)..(10): May or may not be conjugated to a chemical probe
REGYVLQATCERG

SEQ ID NO: 3318 - protein, 27 aa, Homo sapiens
  Table 3 sequence identifier: Q14008_C1360
  MOD_RES (20)..(20): May or may not be conjugated to a chemical probe
RAECLEELGCLVESYGMNVCQPTPGKA

SEQ ID NO: 3319 - protein, 15 aa, Homo sapiens
  Table 3 sequence identifier: P40939_C349
  MOD_RES (13)..(13): May or may not be conjugated to a chemical probe
KALMGLYHGQVLCKK

SEQ ID NO: 3320 - protein, 23 aa, Homo sapiens
  Table 3 sequence identifier: P21333_C2293
  MOD_RES (5)..(5): May or may not be conjugated to a chemical probe
KDGSCGVAYVVQEPGDYEVSVKF

SEQ ID NO: 3321 - protein, 8 aa, Homo sapiens
  Table 3 sequence identifier: P30566_C483
  MOD_RES (7)..(7): May or may not be conjugated to a chemical probe
KVKAELCL

SEQ ID NO: 3322 - protein, 15 aa, Homo sapiens
  Table 3 sequence identifier: Q9Y285_C493
  MOD_RES (13)..(13): May or may not be conjugated to a chemical probe
KVNLQMVYDSPLCRL

SEQ ID NO: 3323 - protein, 9 aa, Homo sapiens
  Table 3 sequence identifier: Q06124_C318
  MOD_RES (2)..(2): May or may not be conjugated to a chemical probe
KCNNSKPKK

SEQ ID NO: 3324 - protein, 9 aa, Homo sapiens
  Table 3 sequence identifier: Q96SZ5_C18
  MOD_RES (4)..(4): May or may not be conjugated to a chemical probe
RQACLTFRG

SEQ ID NO: 3325 - protein, 26 aa, Homo sapiens
  Table 3 sequence identifier: Q96CM8_C122
  MOD_RES (24)..(24): May or may not be conjugated to a chemical probe
RLTFAQLKEEVDKAASGLLSIGLCKG

SEQ ID NO: 3326 - protein, 17 aa, Homo sapiens
  Table 3 sequence identifier: P46063_C606
  MOD_RES (8)..(8): May or may not be conjugated to a chemical probe
RAESSQTCHSEQGDKKM

SEQ ID NO: 3327 - protein, 16 aa, Homo sapiens
  Table 3 sequence identifier: P53618_C248
  MOD_RES (2)..(2): May or may not be conjugated to a chemical probe
RCIYNLLQSSSPAVKY

SEQ ID NO: 3328 - protein, 25 aa, Homo sapiens
  Table 3 sequence identifier: P53618_C684
  MOD_RES (6)..(6): May or may not be conjugated to a chemical probe
KNEMNCKEDQFQLSLLAAMGNTQRK

SEQ ID NO: 3329 - protein, 22 aa, Homo sapiens
  Table 3 sequence identifier: Q9UI10_C465
  MOD_RES (20)..(20): May or may not be conjugated to a chemical probe
RVQTDAFVSNELDDPDDLQCKR

SEQ ID NO: 3330 - protein, 36 aa, Homo sapiens
  Table 3 sequence identifier: Q9UI10_C509
  MOD_RES (27)..(27): May or may not be conjugated to a chemical probe
RLLNLVYDVTPPELVDLVITELGMIPCSSVPVVLRV

SEQ ID NO: 3331 - protein, 25 aa, Homo sapiens
  Table 3 sequence identifier: Q8WV28_C271
  MOD_RES (15)..(15): May or may not be conjugated to a chemical probe
KTTPVASQQNASSVCEEKPIPAERH

SEQ ID NO: 3332 - protein, 14 aa, Homo sapiens
  Table 3 sequence identifier: P49327_C2273
  MOD_RES (11)..(11): May or may not be conjugated to a chemical probe
RLSIPTYGLQCTRA

SEQ ID NO: 3333 - protein, 24 aa, Homo sapiens
  Table 3 sequence identifier: Q9UGV2_C359
  MOD_RES (15)..(15): May or may not be conjugated to a chemical probe
RSVTSNQSDGTQESCESPDVLDRH

SEQ ID NO: 3334 - protein, 41 aa, Homo sapiens
  Table 3 sequence identifier: Q99436_C87
  MOD_RES (12)..(12): May or may not be conjugated to a chemical probe
KIHFISPNIYCCGAGTAADTDMTTQLISSNLELHSLSTGRL

SEQ ID NO: 3335 - protein, 16 aa, Homo sapiens
  Table 3 sequence identifier: Q86YS7_C867
  MOD_RES (6)..(6): May or may not be conjugated to a chemical probe
RSAPPCANSTVGVVKM

SEQ ID NO: 3336 - protein, 9 aa, Homo sapiens
  Table 3 sequence identifier: P48444_C286
  MOD_RES (6)..(6): May or may not be conjugated to a chemical probe
KITLTCGRD

SEQ ID NO: 3337 - protein, 22 aa, Homo sapiens
  Table 3 sequence identifier: Q86V48_C560
  MOD_RES (19)..(19): May or may not be conjugated to a chemical probe
RGHVLGNGSQVTQAANSGCSKA

SEQ ID NO: 3338 - protein, 22 aa, Homo sapiens
  Table 3 sequence identifier: Q9UQ35_C1029
  MOD_RES (10)..(10): May or may not be conjugated to a chemical probe
KSKDSLVQSCPGSLSLCAGVKS

SEQ ID NO: 3339 - protein, 21 aa, Homo sapiens
  Table 3 sequence identifier: Q9BSH5_C109
  MOD_RES (7)..(7): May or may not be conjugated to a chemical probe
KDFSHPCTWQVLDGAEDTLRE

SEQ ID NO: 3340 - protein, 27 aa, Homo sapiens
  Table 3 sequence identifier: Q92973_C790
  MOD_RES (6)..(6): May or may not be conjugated to a chemical probe
RLGYVCPQEVAPMLQQFIRPWCTSLRN

SEQ ID NO: 3341 - protein, 29 aa, Homo sapiens
  Table 3 sequence identifier: Q8N3F8_C597
  MOD_RES (14)..(14): May or may not be conjugated to a chemical probe
RTRGSSGPQPAKPCSGATPTPLLLVGDRS

SEQ ID NO: 3342 - protein, 18 aa, Homo sapiens
  Table 3 sequence identifier: O95425_C1949
  MOD_RES (6)..(6): May or may not be conjugated to a chemical probe
KIKEQCPLEAGLHSSSKV

SEQ ID NO: 3343 - protein, 23 aa, Homo sapiens
  Table 3 sequence identifier: Q8IVH2_C447
  MOD_RES (7)..(7): May or may not be conjugated to a chemical probe
RSSDKFCSPISSELAQNHEFYKN

SEQ ID NO: 3344 - protein, 26 aa, Homo sapiens
  Table 3 sequence identifier: Q15149_C965
  MOD_RES (13)..(13): May or may not be conjugated to a chemical probe
KQVEVTVHKGDECQLVGPAQPSHWKV

SEQ ID NO: 3345 - protein, 13 aa, Homo sapiens
  Table 3 sequence identifier: P25788_C42
  MOD_RES (2)..(2): May or may not be conjugated to a chemical probe
RCKDGVVFGVEKL

SEQ ID NO: 3346 - protein, 9 aa, Homo sapiens
  Table 3 sequence identifier: Q9HB40_C152
  MOD_RES (6)..(6): May or may not be conjugated to a chemical probe
KTFFSCHKE

SEQ ID NO: 3347 - protein, 32 aa, Homo sapiens
  Table 3 sequence identifier: Q08945_C139
  MOD_RES (27)..(27): May or may not be conjugated to a chemical probe
KFGGQLLSFDIGDQPVFEIPLSNVSQCTTGKN

SEQ ID NO: 3348 - protein, 9 aa, Homo sapiens
  Table 3 sequence identifier: Q00577_C272
  MOD_RES (7)..(7): May or may not be conjugated to a chemical probe
KFGHTFCKY

SEQ ID NO: 3349 - protein, 20 aa, Homo sapiens
  Table 3 sequence identifier: Q96EY5_C33
  MOD_RES (8)..(8): May or may not be conjugated to a chemical probe
RGFSAISCTVEGAPASFGKS

SEQ ID NO: 3350 - protein, 32 aa, Homo sapiens
  Table 3 sequence identifier: P13639_C536
  MOD_RES (8)..(8): May or may not be conjugated to a chemical probe
KSDPMVQCIIEESGEHIIAGAGELHLEICLKD

SEQ ID NO: 3351 - protein, 14 aa, Homo sapiens
  Table 3 sequence identifier: P28799_C178
  MOD_RES (2)..(2): May or may not be conjugated to a chemical probe
RCITPTGTHPLAKK

SEQ ID NO: 3352 - protein, 27 aa, Homo sapiens
  Table 3 sequence identifier: Q14258_C475
  MOD_RES (7)..(7): May or may not be conjugated to a chemical probe
KVALSECYTVASVAEMPQNYRPHPQRF

SEQ ID NO: 3353 - protein, 31 aa, Homo sapiens
  Table 3 sequence identifier: O75694_C874
  MOD_RES (28)..(28): May or may not be conjugated to a chemical probe
RDNAAVDGISLHLQDICPLLYSTDDAICSKA

SEQ ID NO: 3354 - protein, 18 aa, Homo sapiens
  Table 3 sequence identifier: P49189_C267
  MOD_RES (10)..(10): May or may not be conjugated to a chemical probe
KSPLIIFSDCDMNNAVKG

SEQ ID NO: 3355 - protein, 22 aa, Homo sapiens
  Table 3 sequence identifier: O43592_C522
  MOD_RES (12)..(12): May or may not be conjugated to a chemical probe
KFFTVEPQHIPCVLMAFLDHRG

SEQ ID NO: 3356 - protein, 16 aa, Homo sapiens
  Table 3 sequence identifier: Q9NUQ3_C127
  MOD_RES (13)..(13): May or may not be conjugated to a chemical probe
RTDPPDGQQDSECNRN

SEQ ID NO: 3357 - protein, 23 aa, Homo sapiens
  Table 3 sequence identifier: O94760_C178
  MOD_RES (4)..(4): May or may not be conjugated to a chemical probe
KSFCSMAGPNLIAIGSSESAQKA

SEQ ID NO: 3358 - protein, 20 aa, Homo sapiens
  Table 3 sequence identifier: P61163_C222
  MOD_RES (3)..(3): May or may not be conjugated to a chemical probe
RACYLSINPQKDETLETEKA

SEQ ID NO: 3359 - protein, 24 aa, Homo sapiens
  Table 3 sequence identifier: Q12905_C311
  MOD_RES (15)..(15): May or may not be conjugated to a chemical probe
RVHTVMTLEQQDMVCYTAQTLVRI

SEQ ID NO: 3360 - protein, 43 aa, Homo sapiens
  Table 3 sequence identifier: Q14814_C217
  MOD_RES (30)..(30): May or may not be conjugated to a chemical probe
RNSVSPGLPQRPASAGAMLGGDLNSANGACPSPVGNGYVSARA

SEQ ID NO: 3361 - protein, 20 aa, Homo sapiens
  Table 3 sequence identifier: P50990_C430
  MOD_RES (10)..(10): May or may not be conjugated to a chemical probe
KQITSYGETCPGLEQYAIKK

SEQ ID NO: 3362 - protein, 31 aa, Homo sapiens
  Table 3 sequence identifier: P49848_C644
  MOD_RES (27)..(27): May or may not be conjugated to a chemical probe
KGGPTSHPSPVPPPASSPSPLSGSALCGGKQ

SEQ ID NO: 3363 - protein, 12 aa, Homo sapiens
  Table 3 sequence identifier: O00541_C153
  MOD_RES (2)..(2): May or may not be conjugated to a chemical probe
KCHVQTIQLCRR

SEQ ID NO: 3364 - protein, 12 aa, Homo sapiens
  Table 3 sequence identifier: P17812_C30
  MOD_RES (3)..(3): May or may not be conjugated to a chemical probe
KSCGLHVTSIKI

SEQ ID NO: 3365 - protein, 9 aa, Homo sapiens
  Table 3 sequence identifier: Q9P287_C213
  MOD_RES (6)..(6): May or may not be conjugated to a chemical probe
RTNKPCGKC

SEQ ID NO: 3366 - protein, 28 aa, Homo sapiens
  Table 3 sequence identifier: Q7LBC6_C1212
  MOD_RES (7)..(7): May or may not be conjugated to a chemical probe
KAIRPPCPDTAPPSSALHWLADLATQKA

SEQ ID NO: 3367 - protein, 15 aa, Homo sapiens
  Table 3 sequence identifier: Q9Y3P9_C155
  MOD_RES (7)..(7): May or may not be conjugated to a chemical probe
KLTYLGCASVNAPRS

SEQ ID NO: 3368 - protein, 17 aa, Homo sapiens
  Table 3 sequence identifier: Q99497_C53
  MOD_RES (6)..(6): May or may not be conjugated to a chemical probe
RDVVICPDASLEDAKKE

SEQ ID NO: 3369 - protein, 14 aa, Homo sapiens
  Table 3 sequence identifier: O95571_C98
  MOD_RES (7)..(7): May or may not be conjugated to a chemical probe
RSLLPGCQSVISRL

SEQ ID NO: 3370 - protein, 10 aa, Homo sapiens
  Table 3 sequence identifier: Q8WUM0_C530
  MOD_RES (8)..(8): May or may not be conjugated to a chemical probe
KAAFLQYCRK

SEQ ID NO: 3371 - protein, 12 aa, Homo sapiens
  Table 3 sequence identifier: P11387_C630
  MOD_RES (7)..(7): May or may not be conjugated to a chemical probe
RAVAILCNHQRA

SEQ ID NO: 3372 - protein, 14 aa, Homo sapiens
  Table 3 sequence identifier: P25098_C340
  MOD_RES (9)..(9): May or may not be conjugated to a chemical probe
RISDLGLACDFSKK

SEQ ID NO: 3373 - protein, 12 aa, Homo sapiens
  Table 3 sequence identifier: Q15796_C70
  MOD_RES (8)..(8): May or may not be conjugated to a chemical probe
KAITTQNCNTKC

SEQ ID NO: 3374 - protein, 22 aa, Homo sapiens
  Table 3 sequence identifier: Q8NF50_C170
  MOD_RES (11)..(11): May or may not be conjugated to a chemical probe
KQTFESETLECSEPAAQAGPRH

SEQ ID NO: 3375 - protein, 24 aa, Homo sapiens
  Table 3 sequence identifier: Q8NF50_C186
  MOD_RES (7)..(7): May or may not be conjugated to a chemical probe
RHLNVLCDVSGKGPVTACDFDLRS

SEQ ID NO: 3376 - protein, 13 aa, Homo sapiens
  Table 3 sequence identifier: Q8N5N7_C52
  MOD_RES (8)..(8): May or may not be conjugated to a chemical probe
KKEPILVCPPLRS

SEQ ID NO: 3377 - protein, 26 aa, Homo sapiens
  Table 3 sequence identifier: Q86UW9_C351
  MOD_RES (22)..(22): May or may not be conjugated to a chemical probe
RVQQALAGMTSVLMSAIGLPVCLSRA

SEQ ID NO: 3378 - protein, 17 aa, Homo sapiens
  Table 3 sequence identifier: I3L3Q1_C657
  MOD_RES (15)..(15): May or may not be conjugated to a chemical probe
KSAMSEIEGIQSLICRQ

SEQ ID NO: 3379 - protein, 24 aa, Homo sapiens
  Table 3 sequence identifier: Q96QA5_C174
  MOD_RES (5)..(5): May or may not be conjugated to a chemical probe
KAEACFSLPFFAPLGLQGSINHKE

SEQ ID NO: 3380 - protein, 19 aa, Homo sapiens
  Table 3 sequence identifier: Q9Y263_C605
  MOD_RES (5)..(5): May or may not be conjugated to a chemical probe
KAINCPEDIVFPALDILRL

SEQ ID NO: 3381 - protein, 26 aa, Homo sapiens
  Table 3 sequence identifier: O75521_C312
  MOD_RES (9)..(9): May or may not be conjugated to a chemical probe
KKLTAGEACAQGLVTEVFPDSTFQKE

SEQ ID NO: 3382 - protein, 18 aa, Homo sapiens
  Table 3 sequence identifier: P08243_C44
  MOD_RES (12)..(12): May or may not be conjugated to a chemical probe
RFENVNGYTNCCFGFHRL

SEQ ID NO: 3383 - protein, 12 aa, Homo sapiens
  Table 3 sequence identifier: Q9BQS8_C293
  MOD_RES (4)..(4): May or may not be conjugated to a chemical probe
RLTCLVAELQKQ

SEQ ID NO: 3384 - protein, 9 aa, Homo sapiens
  Table 3 sequence identifier: Q96QK1_C699
  MOD_RES (5)..(5): May or may not be conjugated to a chemical probe
RVMECLKKA

SEQ ID NO: 3385 - protein, 14 aa, Homo sapiens
  Table 3 sequence identifier: Q8NDI1_C849
  MOD_RES (11)..(11): May or may not be conjugated to a chemical probe
KHNTNTATPFCNRQ

SEQ ID NO: 3386 - protein, 17 aa, Homo sapiens
  Table 3 sequence identifier: P19367_C158
  MOD_RES (12)..(12): May or may not be conjugated to a chemical probe
KLPVGFTFSFPCQQSKI

SEQ ID NO: 3387 - protein, 22 aa, Homo sapiens
  Table 3 sequence identifier: O14818_C63
  MOD_RES (3)..(3): May or may not be conjugated to a chemical probe
KICALDDNVCMAFAGLTADARI

SEQ ID NO: 3388 - protein, 10 aa, Homo sapiens
  Table 3 sequence identifier: Q13439_C1085
  MOD_RES (7)..(7): May or may not be conjugated to a chemical probe
KILLFGCEKE

SEQ ID NO: 3389 - protein, 36 aa, Homo sapiens
  Table 3 sequence identifier: P63279_C93
  MOD_RES (18)..(18): May or may not be conjugated to a chemical probe
KFEPPLFHPNVYPSGTVCLSILEEDKDWRPAITIKQ

SEQ ID NO: 3390 - protein, 17 aa, Homo sapiens
  Table 3 sequence identifier: Q15003_C114
  MOD_RES (14)..(14): May or may not be conjugated to a chemical probe
KFTNTQITEHYSTCIKL

SEQ ID NO: 3391 - protein, 10 aa, Homo sapiens
  Table 3 sequence identifier: O75534_C730
  MOD_RES (2)..(2): May or may not be conjugated to a chemical probe
KCSACNVWRV

SEQ ID NO: 3392 - protein, 14 aa, Homo sapiens
  Table 3 sequence identifier: Q8WVB6_C373
  MOD_RES (6)..(6): May or may not be conjugated to a chemical probe
KVALLCGPPGLGKT

SEQ ID NO: 3393 - protein, 29 aa, Homo sapiens
  Table 3 sequence identifier: Q14204_C3033
  MOD_RES (27)..(27): May or may not be conjugated to a chemical probe
RMNTLLANGEVPGLFEGDEYATLMTQCKE

SEQ ID NO: 3394 - protein, 21 aa, Homo sapiens
  Table 3 sequence identifier: Q9UN37_C233
  MOD_RES (17)..(17): May or may not be conjugated to a chemical probe
RQHKPSIIFIDEVDSLCGSRN

SEQ ID NO: 3395 - protein, 27 aa, Homo sapiens
  Table 3 sequence identifier: Q8WV99_C171
  MOD_RES (21)..(21): May or may not be conjugated to a chemical probe
RAQAVASTSTVPSPSQTMPSCTSPSRA

SEQ ID NO: 3396 - protein, 31 aa, Homo sapiens
  Table 3 sequence identifier: P22102_C237
  MOD_RES (18)..(18): May or may not be conjugated to a chemical probe
RLLEGDGGPNTGGMGAYCPAPQVSNDLLLKI

SEQ ID NO: 3397 - protein, 17 aa, Homo sapiens
  Table 3 sequence identifier: O75643_C133
  MOD_RES (5)..(5): May or may not be conjugated to a chemical probe
RDILCGAADEVLAVLKN

SEQ ID NO: 3398 - protein, 20 aa, Homo sapiens
  Table 3 sequence identifier: P32322_C95
  MOD_RES (7)..(7): May or may not be conjugated to a chemical probe
RHIVVSCAAGVTISSIEKKL

SEQ ID NO: 3399 - protein, 14 aa, Homo sapiens
  Table 3 sequence identifier: Q9H1K1_C138
  MOD_RES (4)..(4): May or may not be conjugated to a chemical probe
KLHCSMLAEDAIKA

SEQ ID NO: 3400 - protein, 11 aa, Homo sapiens
  Table 3 sequence identifier: Q6IA69_C428
  MOD_RES (8)..(8): May or may not be conjugated to a chemical probe
KNSSQETCTRA

SEQ ID NO: 3401 - protein, 10 aa, Homo sapiens
  Table 3 sequence identifier: Q9UQ80_C296
  MOD_RES (7)..(7): May or may not be conjugated to a chemical probe
RMGVVECAKH

SEQ ID NO: 3402 - protein, 17 aa, Homo sapiens
  Table 3 sequence identifier: Q9NP81_C64
  MOD_RES (3)..(3): May or may not be conjugated to a chemical probe
RFCACPEEAAHALELRK

SEQ ID NO: 3403 - protein, 13 aa, Homo sapiens
  Table 3 sequence identifier: Q6L8Q7_C180
  MOD_RES (10)..(10): May or may not be conjugated to a chemical probe
RYIMAGFPVCPKL

SEQ ID NO: 3404 - protein, 10 aa, Homo sapiens
  Table 3 sequence identifier: Q15102_C205
  MOD_RES (8)..(8): May or may not be conjugated to a chemical probe
RLGYTPVCRA

SEQ ID NO: 3405 - protein, 22 aa, Homo sapiens
  Table 3 sequence identifier: Q9Y448_C296
  MOD_RES (9)..(9): May or may not be conjugated to a chemical probe
RFLEQQTLCNNQVNDLTTALKE

SEQ ID NO: 3406 - protein, 15 aa, Homo sapiens
  Table 3 sequence identifier: Q01082_C1389
  MOD_RES (9)..(9): May or may not be conjugated to a chemical probe
KAELFTQSCADLDKW

SEQ ID NO: 3407 - protein, 9 aa, Homo sapiens
  Table 3 sequence identifier: P42704_C113
  MOD_RES (7)..(7): May or may not be conjugated to a chemical probe
KVFNDTCRS

SEQ ID NO: 3408 - protein, 36 aa, Homo sapiens
  Table 3 sequence identifier: O60784_C415
  MOD_RES (14)..(14): May or may not be conjugated to a chemical probe
RQQSTGAIPVTQACLMEDIEQWLSTDVGNDAEEPKG

SEQ ID NO: 3409 - protein, 9 aa, Homo sapiens
  Table 3 sequence identifier: P42858_C1998
  MOD_RES (4)..(4): May or may not be conjugated to a chemical probe
RLLCTPFRV

SEQ ID NO: 3410 - protein, 12 aa, Homo sapiens
  Table 3 sequence identifier: A2A288_C517
  MOD_RES (2)..(2): May or may not be conjugated to a chemical probe
RCQSAGAPLGKP

SEQ ID NO: 3411 - protein, 25 aa, Homo sapiens
  Table 3 sequence identifier: P31930_C453
  MOD_RES (7)..(7): May or may not be conjugated to a chemical probe
KYIYDQCPAVAGYGPIEQLPDYNRI

SEQ ID NO: 3412 - protein, 11 aa, Homo sapiens
  Table 3 sequence identifier: P31939_C287
  MOD_RES (3)..(3): May or may not be conjugated to a chemical probe
KVCMVYDLYKT

SEQ ID NO: 3413 - protein, 32 aa, Homo sapiens
  Table 3 sequence identifier: Q14980_C2009
  MOD_RES (23)..(23): May or may not be conjugated to a chemical probe
RKRVSLEPHQGPGTPESKKATSCFPRPMTPRD

SEQ ID NO: 3414 - protein, 38 aa, Homo sapiens
  Table 3 sequence identifier: Q9NSE4_C364
  MOD_RES (29)..(29): May or may not be conjugated to a chemical probe
KVASVASTLETTFETISTLSGVDLENGTCSHPLIPDKA

SEQ ID NO: 3415 - protein, 10 aa, Homo sapiens
  Table 3 sequence identifier: Q9NSE4_C521
  MOD_RES (6)..(6): May or may not be conjugated to a chemical probe
RRPYWCISRQ

SEQ ID NO: 3416 - protein, 12 aa, Homo sapiens
  Table 3 sequence identifier: Q96ER3_C248
  MOD_RES (5)..(5): May or may not be conjugated to a chemical probe
RLVPCILEAAKQ

SEQ ID NO: 3417 - protein, 15 aa, Homo sapiens
  Table 3 sequence identifier: Q5M775_C493
  MOD_RES (11)..(11): May or may not be conjugated to a chemical probe
KLLNIQQQLTCSLRK

SEQ ID NO: 3418 - protein, 37 aa, Homo sapiens
  Table 3 sequence identifier: Q9P2J5_C446
  MOD_RES (32)..(32): May or may not be conjugated to a chemical probe
KYGIRDDMVLPFEPVPVIEIPGFGNLSAVTICDELKI

SEQ ID NO: 3419 - protein, 20 aa, Homo sapiens
  Table 3 sequence identifier: P35236_C204
  MOD_RES (2)..(2): May or may not be conjugated to a chemical probe
KCVHYWPTEEETYGPFQIRI

SEQ ID NO: 3420 - protein, 30 aa, Homo sapiens
  Table 3 sequence identifier: P14324_C204
  MOD_RES (26)..(26): May or may not be conjugated to a chemical probe
RGQICWYQKPGVGLDAINDANLLEACIYRL

SEQ ID NO: 3421 - protein, 48 aa, Homo sapiens
  Table 3 sequence identifier: P53597_C142
  MOD_RES (35)..(35): May or may not be conjugated to a chemical probe
KEQTGATASVIYVPPPFAAAAINEAIEAEIPLVVCITEGIPQQDMVRV

SEQ ID NO: 3422 - protein, 15 aa, Homo sapiens
  Table 3 sequence identifier: Q9GZT3_C48
  MOD_RES (2)..(2): May or may not be conjugated to a chemical probe
RCILPFDKETGFHRG

SEQ ID NO: 3423 - protein, 31 aa, Homo sapiens
  Table 3 sequence identifier: P10619_C403
  MOD_RES (15)..(15): May or may not be conjugated to a chemical probe
KYQILLYNGDVDMACNFMGDEWFVDSLNQKM

SEQ ID NO: 3424 - protein, 9 aa, Homo sapiens
  Table 3 sequence identifier: Q9UDY2_C601
  MOD_RES (6)..(6): May or may not be conjugated to a chemical probe
RDILACGRG

SEQ ID NO: 3425 - protein, 33 aa, Homo sapiens
  Table 3 sequence identifier: Q13501_C290
  MOD_RES (10)..(10): May or may not be conjugated to a chemical probe
KSSSQPSSCCSDPSKPGGNVEGATQSLAEQMRK

SEQ ID NO: 3426 - protein, 43 aa, Homo sapiens
  Table 3 sequence identifier: Q53EL6_C150
  MOD_RES (30)..(30): May or may not be conjugated to a chemical probe
KGVWGTPGQVYDVEEVDVKDPNYDDDQENCVYETVVLPLDERA

SEQ ID NO: 3427 - protein, 15 aa, Homo sapiens
  Table 3 sequence identifier: Q13618_C636
  MOD_RES (8)..(8): May or may not be conjugated to a chemical probe
RALQSLACGKPTQRV

SEQ ID NO: 3428 - protein, 30 aa, Homo sapiens
  Table 3 sequence identifier: Q93052_C465
  MOD_RES (5)..(5): May or may not be conjugated to a chemical probe
KKAYCEPCYINTLEQCNVCSKPIMERILRA

SEQ ID NO: 3429 - protein, 20 aa, Homo sapiens
  Table 3 sequence identifier: Q92900_C683
  MOD_RES (18)..(18): May or may not be conjugated to a chemical probe
KQLILVGDHCQLGPVVMCKK

SEQ ID NO: 3430 - protein, 16 aa, Homo sapiens
  Table 3 sequence identifier: Q9Y5P6_C230
  MOD_RES (8)..(8): May or may not be conjugated to a chemical probe
KDFLTGMCLFLQSLRQ

SEQ ID NO: 3431 - protein, 32 aa, Homo sapiens
  Table 3 sequence identifier: O14981_C936
  MOD_RES (16)..(16): May or may not be conjugated to a chemical probe
KNLCSSLCVDPYLTPCVTCPVPTQSGQENSKG

SEQ ID NO: 3432 - protein, 22 aa, Homo sapiens
  Table 3 sequence identifier: Q9NR31_C102
  MOD_RES (16)..(16): May or may not be conjugated to a chemical probe
KNYLPAINGIVFLVDCADHSRL

SEQ ID NO: 3433 - protein, 32 aa, Homo sapiens
  Table 3 sequence identifier: Q92623_C30
  MOD_RES (20)..(20): May or may not be conjugated to a chemical probe
KGNPSPPAAGEGQRPPPPLCVPGGGGGAPARG

SEQ ID NO: 3434 - protein, 24 aa, Homo sapiens
  Table 3 sequence identifier: P41743_C595
  MOD_RES (23)..(23): May or may not be conjugated to a chemical probe
KIDQSEFEGFEYINPLLMSAEECV

SEQ ID NO: 3435 - protein, 26 aa, Homo sapiens
  Table 3 sequence identifier: Q6NVY1_C163
  MOD_RES (2)..(2): May or may not be conjugated to a chemical probe
KCLFAMPETAIGLFPDVGGGYFLPRL

SEQ ID NO: 3436 - protein, 16 aa, Homo sapiens
  Table 3 sequence identifier: Q29RF7_C14
  MOD_RES (7)..(7): May or may not be conjugated to a chemical probe
KPATALCGVVSADGKI

SEQ ID NO: 3437 - protein, 25 aa, Homo sapiens
  Table 3 sequence identifier: Q9NQW6_C819
  MOD_RES (6)..(6): May or may not be conjugated to a chemical probe
KADFVCSTVQKPDAANYYYLIILKA

SEQ ID NO: 3438 - protein, 40 aa, Homo sapiens
  Table 3 sequence identifier: Q9Y490_C1434
  MOD_RES (4)..(4): May or may not be conjugated to a chemical probe
KALCGFTEAAAQAAYLVGVSDPNSQAGQQGLVEPTQFARA

SEQ ID NO: 3439 - protein, 10 aa, Homo sapiens
  Table 3 sequence identifier: Q86W50_C432
  MOD_RES (4)..(4): May or may not be conjugated to a chemical probe
RTPCGPALRE

SEQ ID NO: 3440 - protein, 13 aa, Homo sapiens
  Table 3 sequence identifier: Q8IV48_C75
  MOD_RES (9)..(9): May or may not be conjugated to a chemical probe
KEIAITNGCINRM

SEQ ID NO: 3441 - protein, 11 aa, Homo sapiens
  Table 3 sequence identifier: Q9Y3Z3_C341
  MOD_RES (3)..(3): May or may not be conjugated to a chemical probe
RVCEVDNELRI

SEQ ID NO: 3442 - protein, 9 aa, Homo sapiens
  Table 3 sequence identifier: P38646_C366
  MOD_RES (6)..(6): May or may not be conjugated to a chemical probe
RTIAPCQKA

SEQ ID NO: 3443 - protein, 20 aa, Homo sapiens
  Table 3 sequence identifier: P47755_C111
  MOD_RES (9)..(9): May or may not be conjugated to a chemical probe
KEATDPRPCEVENAVESWRT

SEQ ID NO: 3444 - protein, 13 aa, Homo sapiens
  Table 3 sequence identifier: P06730_C170
  MOD_RES (9)..(9): May or may not be conjugated to a chemical probe
KIAIWTTECENRE

SEQ ID NO: 3445 - protein, 25 aa, Homo sapiens
  Table 3 sequence identifier: Q9NR09_C1517
  MOD_RES (23)..(23): May or may not be conjugated to a chemical probe
RYGLYSSPFDPVLFDLEMSGSSCKN

SEQ ID NO: 3446 - protein, 10 aa, Homo sapiens
  Table 3 sequence identifier: P00491_C78
  MOD_RES (3)..(3): May or may not be conjugated to a chemical probe
RACVMMQGRF

SEQ ID NO: 3447 - protein, 19 aa, Homo sapiens
  Table 3 sequence identifier: P08397_C261
  MOD_RES (7)..(7): May or may not be conjugated to a chemical probe
RHLEGGCSVPVAVHTAMKD

SEQ ID NO: 3448 - protein, 10 aa, Homo sapiens
  Table 3 sequence identifier: Q7KZF4_C736
  MOD_RES (6)..(6): May or may not be conjugated to a chemical probe
RRGEFCIAKF

SEQ ID NO: 3449 - protein, 12 aa, Homo sapiens
  Table 3 sequence identifier: O60292_C235
  MOD_RES (3)..(3): May or may not be conjugated to a chemical probe
RGCQALTELLRA

SEQ ID NO: 3450 - protein, 31 aa, Homo sapiens
  Table 3 sequence identifier: Q14166_C528
  MOD_RES (5)..(5): May or may not be conjugated to a chemical probe
KQVHCEEFIPEFEKQYPEFPWTDVQAEIFRA

SEQ ID NO: 3451 - protein, 27 aa, Homo sapiens
  Table 3 sequence identifier: Q14166_C572
  MOD_RES (20)..(20): May or may not be conjugated to a chemical probe
RAFTELFQVACAKPPPLGLCDYPSSRA

SEQ ID NO: 3452 - protein, 11 aa, Homo sapiens
  Table 3 sequence identifier: Q13257_C106
  MOD_RES (8)..(8): May or may not be conjugated to a chemical probe
RWQFDIECDKT

SEQ ID NO: 3453 - protein, 16 aa, Homo sapiens
  Table 3 sequence identifier: Q9NY27_C134
  MOD_RES (8)..(8): May or may not be conjugated to a chemical probe
KNVMVVSCVYPSSEKN

SEQ ID NO: 3454 - protein, 23 aa, Homo sapiens
  Table 3 sequence identifier: P30405_C104
  MOD_RES (8)..(8): May or may not be conjugated to a chemical probe
RVIPSFMCQAGDFTNHNGTGGKS

SEQ ID NO: 3455 - protein, 23 aa, Homo sapiens
  Table 3 sequence identifier: Q9H0D6_C296
  MOD_RES (13)..(13): May or may not be conjugated to a chemical probe
KGKHDELADSLPCAEGEFIFLRL

SEQ ID NO: 3456 - protein, 8 aa, Homo sapiens
  Table 3 sequence identifier: Q8TDG2_C182
  MOD_RES (3)..(3): May or may not be conjugated to a chemical probe
KLCMAGRD

SEQ ID NO: 3457 - protein, 20 aa, Homo sapiens
  Table 3 sequence identifier: O00410_C473
  MOD_RES (17)..(17): May or may not be conjugated to a chemical probe
RVQAHAAAALINFTEDCPKS

SEQ ID NO: 3458 - protein, 24 aa, Homo sapiens
  Table 3 sequence identifier: Q5VUA4_C2168
  MOD_RES (13)..(13): May or may not be conjugated to a chemical probe
KTINSAGLGPSPCLPDLVDFVTRT

SEQ ID NO: 3459 - protein, 29 aa, Homo sapiens
  Table 3 sequence identifier: Q8IXB1_C700
  MOD_RES (13)..(13): May or may not be conjugated to a chemical probe
KNHWVIDFYAPWCGPCQNFAPEFELLARM

SEQ ID NO: 3460 - protein, 22 aa, Homo sapiens
  Table 3 sequence identifier: P53621_C975
  MOD_RES (11)..(11): May or may not be conjugated to a chemical probe
RGRTTYQALPCLPSMYGYPNRN

SEQ ID NO: 3461 - protein, 11 aa, Homo sapiens
  Table 3 sequence identifier: P00441_C147
  MOD_RES (4)..(4): May or may not be conjugated to a chemical probe
RLACGVIGIAQ

SEQ ID NO: 3462 - protein, 22 aa, Homo sapiens
  Table 3 sequence identifier: Q00534_C306
  MOD_RES (2)..(2): May or may not be conjugated to a chemical probe
RCKENLDSHLPPSQNTSELNTA

SEQ ID NO: 3463 - protein, 39 aa, Homo sapiens
  Table 3 sequence identifier: P02545_C570
  MOD_RES (26)..(26): May or may not be conjugated to a chemical probe
RSVTVVEDDEDEDGDDLLHHHHGSHCSSSGDPAEYNLRS

SEQ ID NO: 3464 - protein, 11 aa, Homo sapiens
  Table 3 sequence identifier: P16885_C791
  MOD_RES (9)..(9): May or may not be conjugated to a chemical probe
KRSDELSFCRG

SEQ ID NO: 3465 - protein, 18 aa, Homo sapiens
  Table 3 sequence identifier: A0AVT1_C546
  MOD_RES (3)..(3): May or may not be conjugated to a chemical probe
KVCPTTETIYNDEFYTKQ

SEQ ID NO: 3466 - protein, 16 aa, Homo sapiens
  Table 3 sequence identifier: Q15369_C11
  MOD_RES (6)..(6): May or may not be conjugated to a chemical probe
KTYGGCEGPDAMYVKL

SEQ ID NO: 3467 - protein, 22 aa, Homo sapiens
  Table 3 sequence identifier: Q9BVL2_C252
  MOD_RES (13)..(13): May or may not be conjugated to a chemical probe
KALKDENLPPVICQDVENLQKF

SEQ ID NO: 3468 - protein, 18 aa, Homo sapiens
  Table 3 sequence identifier: O15091_C367
  MOD_RES (15)..(15): May or may not be conjugated to a chemical probe
KTIESIQLSPEEYECLKG

SEQ ID NO: 3469 - protein, 34 aa, Homo sapiens
  Table 3 sequence identifier: Q92835_C902
  MOD_RES (5)..(5): May or may not be conjugated to a chemical probe
RAPPCSGSSITEIINPNYMGVGPFGPPMPLHVKQ

SEQ ID NO: 3470 - protein, 13 aa, Homo sapiens
  Table 3 sequence identifier: Q92835_C1088
  MOD_RES (5)..(5): May or may not be conjugated to a chemical probe
RSFTCSSSAEGRA

SEQ ID NO: 3471 - protein, 12 aa, Homo sapiens
  Table 3 sequence identifier: Q9H3M7_C36
  MOD_RES (7)..(7): May or may not be conjugated to a chemical probe
RVIVEVCEVTRV

SEQ ID NO: 3472 - protein, 33 aa, Homo sapiens
  Table 3 sequence identifier: Q9H3M7_C333
  MOD_RES (22)..(22): May or may not be conjugated to a chemical probe
RTSSEMSWVDLNIPDTPEAPPCYMDVIPEDHRL

SEQ ID NO: 3473 - protein, 28 aa, Homo sapiens
  Table 3 sequence identifier: Q92598_C845
  MOD_RES (22)..(22): May or may not be conjugated to a chemical probe
KEEDLEDKNNFGAEPPHQNGECYPNEKN

SEQ ID NO: 3474 - protein, 26 aa, Homo sapiens
  Table 3 sequence identifier: Q8NEM2_C612
  MOD_RES (12)..(12): May or may not be conjugated to a chemical probe
RTDPSEQVEGNCEIVNELIAASTQKG

SEQ ID NO: 3475 - protein, 8 aa, Homo sapiens
  Table 3 sequence identifier: Q92619_C324
  MOD_RES (6)..(6): May or may not be conjugated to a chemical probe
KIAHNCRQ

SEQ ID NO: 3476 - protein, 12 aa, Homo sapiens
  Table 3 sequence identifier: O94906_C913
  MOD_RES (7)..(7): May or may not be conjugated to a chemical probe
RHGELWCAVSKD

SEQ ID NO: 3477 - protein, 14 aa, Homo sapiens
  Table 3 sequence identifier: Q5TA50_C163
  MOD_RES (8)..(8): May or may not be conjugated to a chemical probe
RAVTVAFCTLPTRE

SEQ ID NO: 3478 - protein, 24 aa, Homo sapiens
  Table 3 sequence identifier: Q9UPN7_C172
  MOD_RES (5)..(5): May or may not be conjugated to a chemical probe
RLLTCVERPQLRQDVVNWLNEEKI

SEQ ID NO: 3479 - protein, 17 aa, Homo sapiens
  Table 3 sequence identifier: Q9P289_C392
  MOD_RES (10)..(10): May or may not be conjugated to a chemical probe
KSIAVAEAACPGITDKM

SEQ ID NO: 3480 - protein, 13 aa, Homo sapiens
  Table 3 sequence identifier: Q16270_C87
  MOD_RES (10)..(10): May or may not be conjugated to a chemical probe
RGYCAPGMECVKS

SEQ ID NO: 3481 - protein, 9 aa, Homo sapiens
  Table 3 sequence identifier: P48556_C112
  MOD_RES (2)..(2): May or may not be conjugated to a chemical probe
KCGEELGRL

SEQ ID NO: 3482 - protein, 15 aa, Homo sapiens
  Table 3 sequence identifier: P49792_C1196
  MOD_RES (12)..(12): May or may not be conjugated to a chemical probe
KTGEEDEEEFFCNRA

SEQ ID NO: 3483 - protein, 16 aa, Homo sapiens
  Table 3 sequence identifier: P49792_C2407
  MOD_RES (8)..(8): May or may not be conjugated to a chemical probe
RVWLWTACDFADGERK

SEQ ID NO: 3484 - protein, 49 aa, Homo sapiens
  Table 3 sequence identifier: Q93008_C1212
  MOD_RES (45)..(45): May or may not be conjugated to a chemical probe
RAVAEACQPGVEGVNPMTQINQVTHDQAVVLQSALQSIPNPSSECMLRN

SEQ ID NO: 3485 - protein, 15 aa, Homo sapiens
  Table 3 sequence identifier: Q9Y617_C98
  MOD_RES (2)..(2): May or may not be conjugated to a chemical probe
RCADYVVTGAWSAKA

SEQ ID NO: 3486 - protein, 38 aa, Homo sapiens
  Table 3 sequence identifier: Q9Y617_C152
  MOD_RES (20)..(20): May or may not be conjugated to a chemical probe
KIPDPSTWNLNPDASYVYYCANETVHGVEFDFIPDVKG

SEQ ID NO: 3487 - protein, 22 aa, Homo sapiens
  Table 3 sequence identifier: Q96AB3_C84
  MOD_RES (3)..(3): May or may not be conjugated to a chemical probe
KTCFSMVPALQQELDSRPQLRS

SEQ ID NO: 3488 - protein, 12 aa, Homo sapiens
  Table 3 sequence identifier: Q9H7Z6_C416
  MOD_RES (7)..(7): May or may not be conjugated to a chemical probe
KGQHVICVTPKL

SEQ ID NO: 3489 - protein, 14 aa, Homo sapiens
  Table 3 sequence identifier: Q01581_C224
  MOD_RES (6)..(6): May or may not be conjugated to a chemical probe
KLSIQCYLSALDRC

SEQ ID NO: 3490 - protein, 11 aa, Homo sapiens
  Table 3 sequence identifier: P62633_C57
  MOD_RES (2)..(2): May or may not be conjugated to a chemical probe
RCGESGHLAKD

SEQ ID NO: 3491 - protein, 14 aa, Homo sapiens
  Table 3 sequence identifier: P39023_C114
  MOD_RES (12)..(12): May or may not be conjugated to a chemical probe
KTVFAEHISDECKR

SEQ ID NO: 3492 - protein, 32 aa, Homo sapiens
  Table 3 sequence identifier: P21333_C210
  MOD_RES (15)..(15): May or may not be conjugated to a chemical probe
RALGALVDSCAPGLCPDWDSWDASKPVTNARE

SEQ ID NO: 3493 - protein, 41 aa, Homo sapiens
  Table 3 sequence identifier: P21333_C1353
  MOD_RES (36)..(36): May or may not be conjugated to a chemical probe
KVEYTPYEEGLHSVDVTYDGSPVPSSPFQVPVTEGCDPSRV

SEQ ID NO: 3494 - protein, 10 aa, Homo sapiens
  Table 3 sequence identifier: O95347_C585
  MOD_RES (2)..(2): May or may not be conjugated to a chemical probe
RCIAPETLRV

SEQ ID NO: 3495 - protein, 25 aa, Homo sapiens
  Table 3 sequence identifier: O00469_C562
  MOD_RES (12)..(12): May or may not be conjugated to a chemical probe
KIFTENIVEQPCPDVFWFPIFSEKA

SEQ ID NO: 3496 - protein, 15 aa, Homo sapiens
  Table 3 sequence identifier: P45880_C13
  MOD_RES (4)..(4): May or may not be conjugated to a chemical probe
RPMCIPPSYADLGKA

SEQ ID NO: 3497 - protein, 12 aa, Homo sapiens
  Table 3 sequence identifier: Q96CM8_C462
  MOD_RES (9)..(9): May or may not be conjugated to a chemical probe
KLNTPGELCIRG

SEQ ID NO: 3498 - protein, 18 aa, Homo sapiens
  Table 3 sequence identifier: P18583_C92
  MOD_RES (2)..(2): May or may not be conjugated to a chemical probe
RCVSVQTDPTDEIPTKKS

SEQ ID NO: 3499 - protein, 12 aa, Homo sapiens
  Table 3 sequence identifier: Q9UKX7_C165
  MOD_RES (8)..(8): May or may not be conjugated to a chemical probe
KQLAALNCSVRD

SEQ ID NO: 3500 - protein, 24 aa, Homo sapiens
  Table 3 sequence identifier: Q9UKX7_C416
  MOD_RES (21)..(21): May or may not be conjugated to a chemical probe
RADTNLGNILLNVLIPPNMPCTRT

SEQ ID NO: 3501 - protein, 11 aa, Homo sapiens
  Table 3 sequence identifier: Q99661_C287
  MOD_RES (2)..(2): May or may not be conjugated to a chemical probe
KCLLLVHEPKL

SEQ ID NO: 3502 - protein, 15 aa, Homo sapiens
  Table 3 sequence identifier: P42765_C179
  MOD_RES (4)..(4): May or may not be conjugated to a chemical probe
REECDKYALQSQQRW

SEQ ID NO: 3503 - protein, 15 aa, Homo sapiens
  Table 3 sequence identifier: P49327_C779
  MOD_RES (7)..(7): May or may not be conjugated to a chemical probe
RGLKPSCTIIPLMKK

SEQ ID NO: 3504 - protein, 16 aa, Homo sapiens
  Table 3 sequence identifier: P49327_C1828
  MOD_RES (2)..(2): May or may not be conjugated to a chemical probe
KCTVFHGAQVEDAFRY

SEQ ID NO: 3505 - protein, 10 aa, Homo sapiens
  Table 3 sequence identifier: O75347_C67
  MOD_RES (7)..(7): May or may not be conjugated to a chemical probe
RMMIPDCQRR

SEQ ID NO: 3506 - protein, 12 aa, Homo sapiens
  Table 3 sequence identifier: P63010_C95
  MOD_RES (3)..(3): May or may not be conjugated to a chemical probe
KDCEDPNPLIRA

SEQ ID NO: 3507 - protein, 21 aa, Homo sapiens
  Table 3 sequence identifier: Q9UDR5_C87
  MOD_RES (14)..(14): May or may not be conjugated to a chemical probe
KAGGILQEDISEACLILGVKR

SEQ ID NO: 3508 - protein, 17 aa, Homo sapiens
  Table 3 sequence identifier: P40925_C154
  MOD_RES (13)..(13): May or may not be conjugated to a chemical probe
KSAPSIPKENFSCLTRL

SEQ ID NO: 3509 - protein, 12 aa, Homo sapiens
  Table 3 sequence identifier: Q13363_C38
  MOD_RES (3)..(3): May or may not be conjugated to a chemical probe
RDCTVEMPILKD

SEQ ID NO: 3510 - protein, 11 aa, Homo sapiens
  Table 3 sequence identifier: P41091_C311
  MOD_RES (4)..(4): May or may not be conjugated to a chemical probe
KLMCKPIFSKI

SEQ ID NO: 3511 - protein, 22 aa, Homo sapiens
  Table 3 sequence identifier: Q9UKI8_C81
  MOD_RES (16)..(16): May or may not be conjugated to a chemical probe
RFTGVASGSTGSTGSCSVGAKA

SEQ ID NO: 3512 - protein, 13 aa, Homo sapiens
  Table 3 sequence identifier: Q13523_C962
  MOD_RES (10)..(10): May or may not be conjugated to a chemical probe
KDLLADLIGCQRL

SEQ ID NO: 3513 - protein, 19 aa, Homo sapiens
  Table 3 sequence identifier: Q12768_C385
  MOD_RES (12)..(12): May or may not be conjugated to a chemical probe
RWLMLHTADSACDPNNKRL

SEQ ID NO: 3514 - protein, 16 aa, Homo sapiens
  Table 3 sequence identifier: Q14203_C636
  MOD_RES (8)..(8): May or may not be conjugated to a chemical probe
KFELSENCSERPGLRG

SEQ ID NO: 3515 - protein, 13 aa, Homo sapiens
  Table 3 sequence identifier: Q96RS6_C111
  MOD_RES (9)..(9): May or may not be conjugated to a chemical probe
RLPTDLTACDNRL

SEQ ID NO: 3516 - protein, 20 aa, Homo sapiens
  Table 3 sequence identifier: Q7L2J0_C153
  MOD_RES (4)..(4): May or may not be conjugated to a chemical probe
RNSCNVGGGGGGFKHPAFKR

SEQ ID NO: 3517 - protein, 32 aa, Homo sapiens
  Table 3 sequence identifier: Q8N0Z6_C439
  MOD_RES (31)..(31): May or may not be conjugated to a chemical probe
RVETPLLLVVNGKPQGSSSQAVATVASRPQCE

SEQ ID NO: 3518 - protein, 11 aa, Homo sapiens
  Table 3 sequence identifier: P13716_C223
  MOD_RES (2)..(2): May or may not be conjugated to a chemical probe
RCYQLPPGARG

SEQ ID NO: 3519 - protein, 11 aa, Homo sapiens
  Table 3 sequence identifier: P12270_C1127
  MOD_RES (9)..(9): May or may not be conjugated to a chemical probe
KAESQLLECKA

SEQ ID NO: 3520 - protein, 16 aa, Homo sapiens
  Table 3 sequence identifier: Q92973_C205
  MOD_RES (7)..(7): May or may not be conjugated to a chemical probe
RSHAVACVNQFIISRT

SEQ ID NO: 3521 - protein, 11 aa, Homo sapiens
  Table 3 sequence identifier: P24928_C981
  MOD_RES (6)..(6): May or may not be conjugated to a chemical probe
KVVLPCNLLRM

SEQ ID NO: 3522 - protein, 35 aa, Homo sapiens
  Table 3 sequence identifier: P52597_C22
  MOD_RES (7)..(7): May or may not be conjugated to a chemical probe
RGLPWSCSVEDVQNFLSDCTIHDGAAGVHFIYTRE

SEQ ID NO: 3523 - protein, 32 aa, Homo sapiens
  Table 3 sequence identifier: Q8TD30_C376
  MOD_RES (3)..(3): May or may not be conjugated to a chemical probe
RLCPPVSGQAAMDIVVNPPVAGEESFEQFSRE

SEQ ID NO: 3524 - protein, 20 aa, Homo sapiens
  Table 3 sequence identifier: Q9Y305_C128
  MOD_RES (14)..(14): May or may not be conjugated to a chemical probe
RILEDLDSLGVLICYMHNKI

SEQ ID NO: 3525 - protein, 12 aa, Homo sapiens
  Table 3 sequence identifier: Q8N163_C754
  MOD_RES (8)..(8): May or may not be conjugated to a chemical probe
RVVTQNICQYRS

SEQ ID NO: 3526 - protein, 13 aa, Homo sapiens
  Table 3 sequence identifier: Q15149_C530
  MOD_RES (9)..(9): May or may not be conjugated to a chemical probe
RSEFERLECLQRI

SEQ ID NO: 3527 - protein, 26 aa, Homo sapiens
  Table 3 sequence identifier: Q15149_C545
  MOD_RES (9)..(9): May or may not be conjugated to a chemical probe
KLQMEAGLCEEQLNQADALLQSDVRL

SEQ ID NO: 3528 - protein, 19 aa, Homo sapiens
  Table 3 sequence identifier: Q9BX68_C75
  MOD_RES (14)..(14): May or may not be conjugated to a chemical probe
KSLPADILYEDQQCLVFRD

SEQ ID NO: 3529 - protein, 17 aa, Homo sapiens
  Table 3 sequence identifier: Q9ULW0_C145
  MOD_RES (2)..(2): May or may not be conjugated to a chemical probe
RCATPVIIDEILPSKKM

SEQ ID NO: 3530 - protein, 19 aa, Homo sapiens
  Table 3 sequence identifier: O14744_C22
  MOD_RES (5)..(5): May or may not be conjugated to a chemical probe
RDLNCVPEIADTLGAVAKQ

SEQ ID NO: 3531 - protein, 27 aa, Homo sapiens
  Table 3 sequence identifier: Q5JRX3_C692
  MOD_RES (18)..(18): May or may not be conjugated to a chemical probe
RNLPDMMQLWSEIFNNPCFEEEEHFKV

SEQ ID NO: 3532 - protein, 25 aa, Homo sapiens
  Table 3 sequence identifier: P07195_C132
  MOD_RES (6)..(6): May or may not be conjugated to a chemical probe
KYSPDCIIIVVSNPVDILTYVTWKL

SEQ ID NO: 3533 - protein, 9 aa, Homo sapiens
  Table 3 sequence identifier: Q96F07_C98
  MOD_RES (2)..(2): May or may not be conjugated to a chemical probe
KCNEQPNRV

SEQ ID NO: 3534 - protein, 14 aa, Homo sapiens
  Table 3 sequence identifier: Q9P0K7_C584
  MOD_RES (5)..(5): May or may not be conjugated to a chemical probe
KSSYCSVIENMNKE

SEQ ID NO: 3535 - protein, 27 aa, Homo sapiens
  Table 3 sequence identifier: P22314_C494
  MOD_RES (10)..(10): May or may not be conjugated to a chemical probe
KNFAMIGLGCGEGGEIIVTDMDTIEKS

SEQ ID NO: 3536 - protein, 15 aa, Homo sapiens
  Table 3 sequence identifier: P78527_C478
  MOD_RES (3)..(3): May or may not be conjugated to a chemical probe
RNCISTVVHQGLIRI

SEQ ID NO: 3537 - protein, 8 aa, Homo sapiens
  Table 3 sequence identifier: P78527_C3187
  MOD_RES (2)..(2): May or may not be conjugated to a chemical probe
RCFFLSKI

SEQ ID NO: 3538 - protein, 23 aa, Homo sapiens
  Table 3 sequence identifier: P78527_C3781
  MOD_RES (19)..(19): May or may not be conjugated to a chemical probe
RVEQLFQVMNGILAQDSACSQRA

SEQ ID NO: 3539 - protein, 11 aa, Homo sapiens
  Table 3 sequence identifier: P42566_C586
  MOD_RES (3)..(3): May or may not be conjugated to a chemical probe
KVCSELDNNRH

SEQ ID NO: 3540 - protein, 26 aa, Homo sapiens
  Table 3 sequence identifier: Q86U28_C146
  MOD_RES (18)..(18): May or may not be conjugated to a chemical probe
RSSFQVLNNPQAQQGCSCGSSFSIKL

SEQ ID NO: 3541 - protein, 19 aa, Homo sapiens
  Table 3 sequence identifier: Q96HE7_C131
  MOD_RES (13)..(13): May or may not be conjugated to a chemical probe
KYSEEANNLIEECEQAERL

SEQ ID NO: 3542 - protein, 13 aa, Homo sapiens
  Table 3 sequence identifier: Q04724_C526
  MOD_RES (9)..(9): May or may not be conjugated to a chemical probe
KSPVSQLDCLNRD

SEQ ID NO: 3543 - protein, 15 aa, Homo sapiens
  Table 3 sequence identifier: Q14789_C2664
  MOD_RES (11)..(11): May or may not be conjugated to a chemical probe
RIAELEEELVCVQKE

SEQ ID NO: 3544 - protein, 24 aa, Homo sapiens
  Table 3 sequence identifier: Q9NUQ3_C101
  MOD_RES (9)..(9): May or may not be conjugated to a chemical probe
RNLVSPAYCTQESREEIPGGEART

SEQ ID NO: 3545 - protein, 12 aa, Homo sapiens
  Table 3 sequence identifier: Q9ULX6_C128
  MOD_RES (8)..(8): May or may not be conjugated to a chemical probe
RYDSYESCDSRA

SEQ ID NO: 3546 - protein, 29 aa, Homo sapiens
  Table 3 sequence identifier: Q12905_C271
  MOD_RES (2)..(2): May or may not be conjugated to a chemical probe
RCLQILAAGLFLPGSVGITDPCESGNFRV

SEQ ID NO: 3547 - protein, 30 aa, Homo sapiens
  Table 3 sequence identifier: P23588_C457
  MOD_RES (14)..(14): May or may not be conjugated to a chemical probe
KSLENETLNKEEDCHSPTSKPPKPDQPLKV

SEQ ID NO: 3548 - protein, 11 aa, Homo sapiens
  Table 3 sequence identifier: P50991_C379
  MOD_RES (5)..(5): May or may not be conjugated to a chemical probe
KITGCASPGKT

SEQ ID NO: 3549 - protein, 13 aa, Homo sapiens
  Table 3 sequence identifier: P50991_C450
  MOD_RES (10)..(10): May or may not be conjugated to a chemical probe
RTLSGMESYCVRA

SEQ ID NO: 3550 - protein, 16 aa, Homo sapiens
  Table 3 sequence identifier: B0V043_C682
  MOD_RES (2)..(2): May or may not be conjugated to a chemical probe
RCGEMAQAASAAVTRG

SEQ ID NO: 3551 - protein, 21 aa, Homo sapiens
  Table 3 sequence identifier: P22307_C495
  MOD_RES (4)..(4): May or may not be conjugated to a chemical probe
KADCTITMADSDFLALMTGKM

SEQ ID NO: 3552 - protein, 29 aa, Homo sapiens
  Table 3 sequence identifier: Q13472_C244
  MOD_RES (17)..(17): May or may not be conjugated to a chemical probe
RIFPEVLAEQLISYGSCQFPTLGFVVERF

SEQ ID NO: 3553 - protein, 20 aa, Homo sapiens
  Table 3 sequence identifier: Q14315_C1103
  MOD_RES (16)..(16): May or may not be conjugated to a chemical probe
KGAGTGGLGLTVEGPCEAKI

SEQ ID NO: 3554 - protein, 9 aa, Homo sapiens
  Table 3 sequence identifier: O43747_C539
  MOD_RES (4)..(4): May or may not be conjugated to a chemical probe
RFTCTVNRI

SEQ ID NO: 3555 - protein, 39 aa, Homo sapiens
  Table 3 sequence identifier: P23434_C85
  MOD_RES (30)..(30): May or may not be conjugated to a chemical probe
KHEWVTTENGIGTVGISNFAQEALGDVVYCSLPEVGTKL

SEQ ID NO: 3556 - protein, 14 aa, Homo sapiens
  Table 3 sequence identifier: Q9H9A6_C23
  MOD_RES (3)..(3): May or may not be conjugated to a chemical probe
RDCGTSVPQGLLKA

SEQ ID NO: 3557 - protein, 28 aa, Homo sapiens
  Table 3 sequence identifier: Q8IXH7_C195
  MOD_RES (19)..(19): May or may not be conjugated to a chemical probe
KLISDAGYQGEITSVSTACQQLEVFSRV

SEQ ID NO: 3558 - protein, 43 aa, Homo sapiens
  Table 3 sequence identifier: P22681_C840
  MOD_RES (6)..(6): May or may not be conjugated to a chemical probe
RKAGSCQQGSGPAASAATASPQLSSEIENLMSQGYSYQDIQKA

SEQ ID NO: 3559 - protein, 9 aa, Homo sapiens
  Table 3 sequence identifier: Q9NVS2_C186
  MOD_RES (5)..(5): May or may not be conjugated to a chemical probe
RDNVCYSRT

SEQ ID NO: 3560 - protein, 11 aa, Homo sapiens
  Table 3 sequence identifier: Q8NF50_C2091
  MOD_RES (3)..(3): May or may not be conjugated to a chemical probe
RKCETQLSQGS

SEQ ID NO: 3561 - protein, 19 aa, Homo sapiens
  Table 3 sequence identifier: P09110_C123
  MOD_RES (3)..(3): May or may not be conjugated to a chemical probe
RQCSSGLQAVASIAGGIRN

SEQ ID NO: 3562 - protein, 27 aa, Homo sapiens
  Table 3 sequence identifier: Q8TAF3_C342
  MOD_RES (10)..(10): May or may not be conjugated to a chemical probe
RASGDYDNDCTNPITPLCTQPDQVIKG

SEQ ID NO: 3563 - protein, 38 aa, Homo sapiens
  Table 3 sequence identifier: Q96S55_C347
  MOD_RES (13)..(13): May or may not be conjugated to a chemical probe
KSQQDTFLPHVECGTITLIGATTENPSFQVNAALLSRC

SEQ ID NO: 3564 - protein, 18 aa, Homo sapiens
  Table 3 sequence identifier: P45973_C133
  MOD_RES (9)..(9): May or may not be conjugated to a chemical probe
KIIGATDSCGDLMFLMKW

SEQ ID NO: 3565 - protein, 23 aa, Homo sapiens
  Table 3 sequence identifier: Q92785_C53
  MOD_RES (16)..(16): May or may not be conjugated to a chemical probe
RLPFLDSQTGVAQSNCYIWMEKR

SEQ ID NO: 3566 - protein, 25 aa, Homo sapiens
  Table 3 sequence identifier: O43175_C254
  MOD_RES (8)..(8): May or may not be conjugated to a chemical probe
RALQSGQCAGAALDVFTEEPPRDRA

SEQ ID NO: 3567 - protein, 18 aa, Homo sapiens
  Table 3 sequence identifier: P11388_C405
  MOD_RES (6)..(6): May or may not be conjugated to a chemical probe
KAAIGCGIVESILNWVKF

SEQ ID NO: 3568 - protein, 25 aa, Homo sapiens
  Table 3 sequence identifier: Q14699_C211
  MOD_RES (18)..(18): May or may not be conjugated to a chemical probe
RGDHASLENEKPGTGDVCSAPAGRN

SEQ ID NO: 3569 - protein, 10 aa, Homo sapiens
  Table 3 sequence identifier: P19367_C823
  MOD_RES (4)..(4): May or may not be conjugated to a chemical probe
KTVCGVVSRR

SEQ ID NO: 3570 - protein, 16 aa, Homo sapiens
  Table 3 sequence identifier: Q9BV38_C384
  MOD_RES (10)..(10): May or may not be conjugated to a chemical probe
RTEQLQAVLCSTMEKS

SEQ ID NO: 3571 - protein, 25 aa, Homo sapiens
  Table 3 sequence identifier: Q27J81_C38
  MOD_RES (22)..(22): May or may not be conjugated to a chemical probe
KLGPQDSDPTEANLESADPELCIRL

SEQ ID NO: 3572 - protein, 42 aa, Homo sapiens
  Table 3 sequence identifier: Q27J81_C1093
  MOD_RES (19)..(19): May or may not be conjugated to a chemical probe
RSSWYVDASDVLTTEDPQCPQPLEGAWPVTLGDAQALKPLKF

SEQ ID NO: 3573 - protein, 31 aa, Homo sapiens
  Table 3 sequence identifier: Q16740_C86
  MOD_RES (4)..(4): May or may not be conjugated to a chemical probe
RIVCVMGPIDDSVASLVIAQLLFLQSESNKK

SEQ ID NO: 3574 - protein, 17 aa, Homo sapiens
  Table 3 sequence identifier: P55010_C59
  MOD_RES (5)..(5): May or may not be conjugated to a chemical probe
KYFGCELGAQTQFDVKN

SEQ ID NO: 3575 - protein, 12 aa, Homo sapiens
  Table 3 sequence identifier: P50213_C331
  MOD_RES (6)..(6): May or may not be conjugated to a chemical probe
RIEAACFATIKD

SEQ ID NO: 3576 - protein, 12 aa, Homo sapiens
  Table 3 sequence identifier: Q9Y692_C113
  MOD_RES (5)..(5): May or may not be conjugated to a chemical probe
RKFVCPGINVKC

SEQ ID NO: 3577 - protein, 11 aa, Homo sapiens
  Table 3 sequence identifier: Q9C0C9_C341
  MOD_RES (4)..(4): May or may not be conjugated to a chemical probe
RLGCFDHAQRQ

SEQ ID NO: 3578 - protein, 13 aa, Homo sapiens
  Table 3 sequence identifier: O15392_C84
  MOD_RES (6)..(6): May or may not be conjugated to a chemical probe
KHSSGCAFLSVKK

SEQ ID NO: 3579 - protein, 13 aa, Homo sapiens
  Table 3 sequence identifier: O75533_C1035
  MOD_RES (6)..(6): May or may not be conjugated to a chemical probe
KVQENCIDLVGRI

SEQ ID NO: 3580 - protein, 10 aa, Homo sapiens
  Table 3 sequence identifier: Q14192_C132
  MOD_RES (2)..(2): May or may not be conjugated to a chemical probe
RCQQPIGTKS

SEQ ID NO: 3581 - protein, 16 aa, Homo sapiens
  Table 3 sequence identifier: P33991_C162
  MOD_RES (14)..(14): May or may not be conjugated to a chemical probe
KLVIWGTDVNVAACKE

SEQ ID NO: 3582 - protein, 20 aa, Homo sapiens
  Table 3 sequence identifier: O60684_C208
  MOD_RES (7)..(7): May or may not be conjugated to a chemical probe
RDYVLNCSILNPLLTLLTKS

SEQ ID NO: 3583 - protein, 12 aa, Homo sapiens
  Table 3 sequence identifier: Q92841_C277
  MOD_RES (4)..(4): May or may not be conjugated to a chemical probe
KSTCIYGGAPKG

SEQ ID NO: 3584 - protein, 20 aa, Homo sapiens
  Table 3 sequence identifier: P07814_C692
  MOD_RES (18)..(18): May or may not be conjugated to a chemical probe
RGFFICDQPYEPVSPYSCKE

SEQ ID NO: 3585 - protein, 21 aa, Homo sapiens
  Table 3 sequence identifier: P07814_C1076
  MOD_RES (7)..(7): May or may not be conjugated to a chemical probe
KLGVENCYFPMFVSQSALEKE

SEQ ID NO: 3586 - protein, 16 aa, Homo sapiens
  Table 3 sequence identifier: P22102_C733
  MOD_RES (5)..(5): May or may not be conjugated to a chemical probe
RTFNCGVGAVLVVSKE

SEQ ID NO: 3587 - protein, 49 aa, Homo sapiens
  Table 3 sequence identifier: P32322_C159
  MOD_RES (13)..(13): May or may not be conjugated to a chemical probe
RLMEQLLSSVGFCTEVEEDLIDAVTGLSGSGPAYAFTALDALADGGVKM

SEQ ID NO: 3588 - protein, 10 aa, Homo sapiens
  Table 3 sequence identifier: O75794_C212
  MOD_RES (2)..(2): May or may not be conjugated to a chemical probe
RCIQDFFKKH

SEQ ID NO: 3589 - protein, 11 aa, Homo sapiens
  Table 3 sequence identifier: Q02750_C341
  MOD_RES (2)..(2): May or may not be conjugated to a chemical probe
KCLIKNPAERA

SEQ ID NO: 3590 - protein, 12 aa, Homo sapiens
  Table 3 sequence identifier: Q96RL1_C257
  MOD_RES (3)..(3): May or may not be conjugated to a chemical probe
RHCLPTLADAKG

SEQ ID NO: 3591 - protein, 23 aa, Homo sapiens
  Table 3 sequence identifier: O15371_C196
  MOD_RES (14)..(14): May or may not be conjugated to a chemical probe
RYLEVSEPQDIECCGALEYYDKA

SEQ ID NO: 3592 - protein, 15 aa, Homo sapiens
  Table 3 sequence identifier: Q7L2E3_C346
  MOD_RES (4)..(4): May or may not be conjugated to a chemical probe
RRPCTIQVPEPILRK

SEQ ID NO: 3593 - protein, 12 aa, Homo sapiens
  Table 3 sequence identifier: O00159_C763
  MOD_RES (5)..(5): May or may not be conjugated to a chemical probe
RSAICIQSWWRG

SEQ ID NO: 3594 - protein, 12 aa, Homo sapiens
  Table 3 sequence identifier: Q8WTW3_C72
  MOD_RES (2)..(2): May or may not be conjugated to a chemical probe
RCAVGLVDAVKA

SEQ ID NO: 3595 - protein, 35 aa, Homo sapiens
  Table 3 sequence identifier: Q96KP1_C627
  MOD_RES (28)..(28): May or may not be conjugated to a chemical probe
RLAEKEDWIVDNEGLTSLPCQFEQCIVCSLQSLKG

SEQ ID NO: 3596 - protein, 20 aa, Homo sapiens
  Table 3 sequence identifier: P62136_C155
  MOD_RES (6)..(6): May or may not be conjugated to a chemical probe
KTFTDCFNCLPIAAIVDEKI

SEQ ID NO: 3597 - protein, 19 aa, Homo sapiens
  Table 3 sequence identifier: Q9UNH7_C348
  MOD_RES (16)..(16): May or may not be conjugated to a chemical probe
KNKDVLQAETSQQLCCQKF

SEQ ID NO: 3598 - protein, 19 aa, Homo sapiens
  Table 3 sequence identifier: Q86UY8_C276
  MOD_RES (12)..(12): May or may not be conjugated to a chemical probe
RAIEADIEKYICYAEQTRA

SEQ ID NO: 3599 - protein, 42 aa, Homo sapiens
  Table 3 sequence identifier: P14866_C151
  MOD_RES (14)..(14): May or may not be conjugated to a chemical probe
RQALVEFEDVLGACNAVNYAADNQIYIAGHPAFVNYSTSQKI

SEQ ID NO: 3600 - protein, 36 aa, Homo sapiens
  Table 3 sequence identifier: P40123_C32
  MOD_RES (16)..(16): May or may not be conjugated to a chemical probe
RLESLSAESHRPPGNCGEVNGVIAGVAPSVEAFDKL

SEQ ID NO: 3601 - protein, 16 aa, Homo sapiens
  Table 3 sequence identifier: Q86VQ1_C461
  MOD_RES (12)..(12): May or may not be conjugated to a chemical probe
KVNFIPTGSAFCPVKL

SEQ ID NO: 3602 - protein, 10 aa, Homo sapiens
  Table 3 sequence identifier: Q13451_C394
  MOD_RES (7)..(7): May or may not be conjugated to a chemical probe
RLQISMCQKK

SEQ ID NO: 3603 - protein, 16 aa, Homo sapiens
  Table 3 sequence identifier: Q9P2E9_C1216
  MOD_RES (10)..(10): May or may not be conjugated to a chemical probe
KHMAAASAECQNYAKE

SEQ ID NO: 3604 - protein, 26 aa, Homo sapiens
  Table 3 sequence identifier: P51570_C351
  MOD_RES (10)..(10): May or may not be conjugated to a chemical probe
RMTGGGFGGCTVTLLEASAAPHAMRH

SEQ ID NO: 3605 - protein, 19 aa, Homo sapiens
  Table 3 sequence identifier: Q9NSE4_C155
  MOD_RES (10)..(10): May or may not be conjugated to a chemical probe
KIHFVPGWDCHGLPIEIKV

SEQ ID NO: 3606 - protein, 28 aa, Homo sapiens
  Table 3 sequence identifier: Q9BTC0_C976
  MOD_RES (8)..(8): May or may not be conjugated to a chemical probe
RTAPSSSCTAVASAASRPDSTHMVEARQ

SEQ ID NO: 3607 - protein, 11 aa, Homo sapiens
  Table 3 sequence identifier: P07355_C335
  MOD_RES (7)..(7): May or may not be conjugated to a chemical probe
KALLYLCGGDD

SEQ ID NO: 3608 - protein, 23 aa, Homo sapiens
  Table 3 sequence identifier: Q5M775_C578
  MOD_RES (15)..(15): May or may not be conjugated to a chemical probe
KATEASAVEQTAESCEVQEMLKV

SEQ ID NO: 3609 - protein, 26 aa, Homo sapiens
  Table 3 sequence identifier: P17987_C218
  MOD_RES (16)..(16): May or may not be conjugated to a chemical probe
RSQMESMLISGYALNCVVGSQGMPKR

SEQ ID NO: 3610 - protein, 13 aa, Homo sapiens
  Table 3 sequence identifier: Q99614_C149
  MOD_RES (9)..(9): May or may not be conjugated to a chemical probe
RALEMCPSCFQKE

SEQ ID NO: 3611 - protein, 12 aa, Homo sapiens
  Table 3 sequence identifier: O75663_C75
  MOD_RES (2)..(2): May or may not be conjugated to a chemical probe
RCVNNYQGMLKV

SEQ ID NO: 3612 - protein, 11 aa, Homo sapiens
  Table 3 sequence identifier: Q52LW3_C1066
  MOD_RES (8)..(8): May or may not be conjugated to a chemical probe
KDAATTVCSKF

SEQ ID NO: 3613 - protein, 11 aa, Homo sapiens
  Table 3 sequence identifier: H3BQZ7_C405
  MOD_RES (9)..(9): May or may not be conjugated to a chemical probe
RALLPHVLCKN

SEQ ID NO: 3614 - protein, 33 aa, Homo sapiens
  Table 3 sequence identifier: Q9BUL9_C16
  MOD_RES (9)..(9): May or may not be conjugated to a chemical probe
RSEEAPAGCGAEGGGPGSGPFADLAPGAVHMRV

SEQ ID NO: 3615 - protein, 20 aa, Homo sapiens
  Table 3 sequence identifier: Q15286_C163
  MOD_RES (12)..(12): May or may not be conjugated to a chemical probe
KENVNVEEMFNCITELVLRA

SEQ ID NO: 3616 - protein, 18 aa, Homo sapiens
  Table 3 sequence identifier: P16278_C393
  MOD_RES (11)..(11): May or may not be conjugated to a chemical probe
KTVGAALDILCPSGPIKS

SEQ ID NO: 3617 - protein, 13 aa, Homo sapiens
  Table 3 sequence identifier: Q9HC38_C197
  MOD_RES (11)..(11): May or may not be conjugated to a chemical probe
RALLGYADNQCKL

SEQ ID NO: 3618 - protein, 9 aa, Homo sapiens
  Table 3 sequence identifier: Q9UM22_C88
  MOD_RES (7)..(7): May or may not be conjugated to a chemical probe
RKALIPCKR

SEQ ID NO: 3619 - protein, 16 aa, Homo sapiens
  Table 3 sequence identifier: Q15056_C85
  MOD_RES (4)..(4): May or may not be conjugated to a chemical probe
KGFCYVEFDEVDSLKE

SEQ ID NO: 3620 - protein, 27 aa, Homo sapiens
  Table 3 sequence identifier: P23284_C202
  MOD_RES (13)..(13): May or may not be conjugated to a chemical probe
RDKPLKDVIIADCGKIEVEKPFAIAKE

SEQ ID NO: 3621 - protein, 20 aa, Homo sapiens
  Table 3 sequence identifier: P46777_C100
  MOD_RES (12)..(12): May or may not be conjugated to a chemical probe
KVGLTNYAAAYCTGLLLARR

SEQ ID NO: 3622 - protein, 29 aa, Homo sapiens
  Table 3 sequence identifier: Q68CZ2_C928
  MOD_RES (18)..(18): May or may not be conjugated to a chemical probe
RADASSTPSFQQAFASSCTISSNGPGQRR

SEQ ID NO: 3623 - protein, 30 aa, Homo sapiens
  Table 3 sequence identifier: Q68CZ2_C1251
  MOD_RES (3)..(3): May or may not be conjugated to a chemical probe
KGCSNEPYFGSLTALVCQHSITPLALPCKL

SEQ ID NO: 3624 - protein, 24 aa, Homo sapiens
  Table 3 sequence identifier: P18031_C215
  MOD_RES (17)..(17): May or may not be conjugated to a chemical probe
RESGSLSPEHGPVVVHCSAGIGRS

SEQ ID NO: 3625 - protein, 9 aa, Homo sapiens
  Table 3 sequence identifier: O95456_C106
  MOD_RES (7)..(7): May or may not be conjugated to a chemical probe
KLWNEWCRT

SEQ ID NO: 3626 - protein, 18 aa, Homo sapiens
  Table 3 sequence identifier: O95453_C543
  MOD_RES (6)..(6): May or may not be conjugated to a chemical probe
RLNPQCIPYTLQNHYYRN

SEQ ID NO: 3627 - protein, 14 aa, Homo sapiens
  Table 3 sequence identifier: Q5VTL8_C113
  MOD_RES (9)..(9): May or may not be conjugated to a chemical probe
KTAGQTGMCGGVRG

SEQ ID NO: 3628 - protein, 11 aa, Homo sapiens
  Table 3 sequence identifier: P31948_C370
  MOD_RES (7)..(7): May or may not be conjugated to a chemical probe
KNKGNECFQKG

SEQ ID NO: 3629 - protein, 27 aa, Homo sapiens
  Table 3 sequence identifier: O95071_C1476
  MOD_RES (15)..(15): May or may not be conjugated to a chemical probe
RVFQALLPYAVEELCNVAESLIVPVRM

SEQ ID NO: 3630 - protein, 11 aa, Homo sapiens
  Table 3 sequence identifier: Q9NQW6_C260
  MOD_RES (7)..(7): May or may not be conjugated to a chemical probe
KQEATFCSQRD

SEQ ID NO: 3631 - protein, 10 aa, Homo sapiens
  Table 3 sequence identifier: Q9NQW6_C437
  MOD_RES (7)..(7): May or may not be conjugated to a chemical probe
RQKELACLRG

SEQ ID NO: 3632 - protein, 11 aa, Homo sapiens
  Table 3 sequence identifier: Q9NQW6_C512
  MOD_RES (6)..(6): May or may not be conjugated to a chemical probe
KGFTECEMTKS

SEQ ID NO: 3633 - protein, 30 aa, Homo sapiens
  Table 3 sequence identifier: P51649_C502
  MOD_RES (23)..(23): May or may not be conjugated to a chemical probe
RVAEQLEVGMVGVNEGLISSVECPFGGVKQ

SEQ ID NO: 3634 - protein, 11 aa, Homo sapiens
  Table 3 sequence identifier: P11802_C78
  MOD_RES (6)..(6): May or may not be conjugated to a chemical probe
RLMDVCATSRT

SEQ ID NO: 3635 - protein, 28 aa, Homo sapiens
  Table 3 sequence identifier: P49915_C631
  MOD_RES (25)..(25): May or may not be conjugated to a chemical probe
KISQMPVILTPLHFDRDPLQKQPSCQRS

SEQ ID NO: 3636 - protein, 15 aa, Homo sapiens
  Table 3 sequence identifier: Q9UKN8_C116
  MOD_RES (11)..(11): May or may not be conjugated to a chemical probe
RTSVPAPLNSCLLKV

SEQ ID NO: 3637 - protein, 11 aa, Homo sapiens
  Table 3 sequence identifier: O60504_C482
  MOD_RES (7)..(7): May or may not be conjugated to a chemical probe
RKGEHICLIRK

SEQ ID NO: 3638 - protein, 16 aa, Homo sapiens
  Table 3 sequence identifier: Q9Y490_C956
  MOD_RES (14)..(14): May or may not be conjugated to a chemical probe
KASAGPQPLLVQSCKA

SEQ ID NO: 3639 - protein, 22 aa, Homo sapiens
  Table 3 sequence identifier: P23381_C309
  MOD_RES (12)..(12): May or may not be conjugated to a chemical probe
RDRTDIQCLIPCAIDQDPYFRM

SEQ ID NO: 3640 - protein, 29 aa, Homo sapiens
  Table 3 sequence identifier: P27708_C1696
  MOD_RES (2)..(2): May or may not be conjugated to a chemical probe
KCGSRPPPGFPGLETMLPLLLTAVSEGRL

SEQ ID NO: 3641 - protein, 36 aa, Homo sapiens
  Table 3 sequence identifier: O75607_C79
  MOD_RES (27)..(27): May or may not be conjugated to a chemical probe
KVEEEDDAEHVLALTMLCLTEGAKDECNVVEVVARN

SEQ ID NO: 3642 - protein, 25 aa, Homo sapiens
  Table 3 sequence identifier: O75131_C506
  MOD_RES (7)..(7): May or may not be conjugated to a chemical probe
KEALAQCVLAEIPQQVVGYFNTYKL

SEQ ID NO: 3643 - protein, 23 aa, Homo sapiens
  Table 3 sequence identifier: P38646_C66
  MOD_RES (15)..(15): May or may not be conjugated to a chemical probe
KGAVVGIDLGTTNSCVAVMEGKQ

SEQ ID NO: 3644 - protein, 15 aa, Homo sapiens
  Table 3 sequence identifier: P49588_C671
  MOD_RES (8)..(8): May or may not be conjugated to a chemical probe
KAVYTQDCPLAAAKA

SEQ ID NO: 3645 - protein, 12 aa, Homo sapiens
  Table 3 sequence identifier: P07602_C33
  MOD_RES (7)..(7): May or may not be conjugated to a chemical probe
RGSAVWCQNVKT

SEQ ID NO: 3646 - protein, 46 aa, Homo sapiens
  Table 3 sequence identifier: P28065_C63
  MOD_RES (4)..(4): May or may not be conjugated to a chemical probe
RIYCALSGSAADAQAVADMAAYQLELHGIELEEPPLVLAAANVVRN

SEQ ID NO: 3647 - protein, 10 aa, Homo sapiens
  Table 3 sequence identifier: P15498_C794
  MOD_RES (7)..(7): May or may not be conjugated to a chemical probe
KARYDFCARD

SEQ ID NO: 3648 - protein, 9 aa, Homo sapiens
  Table 3 sequence identifier: P08559_C273
  MOD_RES (7)..(7): May or may not be conjugated to a chemical probe
RFAAAYCRS

SEQ ID NO: 3649 - protein, 32 aa, Homo sapiens
  Table 3 sequence identifier: Q8WZ82_C129
  MOD_RES (22)..(22): May or may not be conjugated to a chemical probe
RLGPFDGLLGFSQGAALAALVCALGQAGDPRF

SEQ ID NO: 3650 - protein, 12 aa, Homo sapiens
  Table 3 sequence identifier: P46939_C1627
  MOD_RES (3)..(3): May or may not be conjugated to a chemical probe
RLCVLNAGWSRV

SEQ ID NO: 3651 - protein, 24 aa, Homo sapiens
  Table 3 sequence identifier: Q14166_C361
  MOD_RES (16)..(16): May or may not be conjugated to a chemical probe
KLSQERPGVLLNQFPCENLLTVKD

SEQ ID NO: 3652 - protein, 14 aa, Homo sapiens
  Table 3 sequence identifier: O43314_C488
  MOD_RES (11)..(11): May or may not be conjugated to a chemical probe
KVQLTYLPHGCPKT

SEQ ID NO: 3653 - protein, 8 aa, Homo sapiens
  Table 3 sequence identifier: P60981_C147
  MOD_RES (3)..(3): May or may not be conjugated to a chemical probe
RACIAEKL

SEQ ID NO: 3654 - protein, 14 aa, Homo sapiens
  Table 3 sequence identifier: A6NHR9_C444
  MOD_RES (9)..(9): May or may not be conjugated to a chemical probe
RETYPDDPCFPSKL

SEQ ID NO: 3655 - protein, 10 aa, Homo sapiens
  Table 3 sequence identifier: Q9Y2X0_C539
  MOD_RES (5)..(5): May or may not be conjugated to a chemical probe
KLSPCTVTRV

SEQ ID NO: 3656 - protein, 16 aa, Homo sapiens
  Table 3 sequence identifier: Q5VYS8_C70
  MOD_RES (5)..(5): May or may not be conjugated to a chemical probe
RKGPCAVSSNPYAFKN

SEQ ID NO: 3657 - protein, 20 aa, Homo sapiens
  Table 3 sequence identifier: P24298_C450
  MOD_RES (9)..(9): May or may not be conjugated to a chemical probe
RLLEETGICVVPGSGFGQRE

SEQ ID NO: 3658 - protein, 16 aa, Homo sapiens
  Table 3 sequence identifier: P42331_C448
  MOD_RES (2)..(2): May or may not be conjugated to a chemical probe
KCFLTSAFQGANSSKM

SEQ ID NO: 3659 - protein, 11 aa, Homo sapiens
  Table 3 sequence identifier: Q14573_C1638
  MOD_RES (2)..(2): May or may not be conjugated to a chemical probe
RCESGGFLSKL

SEQ ID NO: 3660 - protein, 12 aa, Homo sapiens
  Table 3 sequence identifier: O75717_C716
  MOD_RES (5)..(5): May or may not be conjugated to a chemical probe
KLPYCQIATEKG

SEQ ID NO: 3661 - protein, 23 aa, Homo sapiens
  Table 3 sequence identifier: Q9NYV4_C723
  MOD_RES (2)..(2): May or may not be conjugated to a chemical probe
RCVDKFDIIGIIGEGTYGQVYKA

SEQ ID NO: 3662 - protein, 14 aa, Homo sapiens
  Table 3 sequence identifier: P62487_C38
  MOD_RES (10)..(10): May or may not be conjugated to a chemical probe
KLFTEVEGTCTGKY

SEQ ID NO: 3663 - protein, 33 aa, Homo sapiens
  Table 3 sequence identifier: Q96I99_C369
  MOD_RES (23)..(23): May or may not be conjugated to a chemical probe
KLLTADPKVEAILVNIFGGIVNCAIIANGITKA

SEQ ID NO: 3664 - protein, 21 aa, Homo sapiens
  Table 3 sequence identifier: O00629_C57
  MOD_RES (10)..(10): May or may not be conjugated to a chemical probe
RRNVPHEDICEDSDIDGDYRV

SEQ ID NO: 3665 - protein, 25 aa, Homo sapiens
  Table 3 sequence identifier: Q9BW85_C275
  MOD_RES (6)..(6): May or may not be conjugated to a chemical probe
KADPDCSNGQPQAAPTPGAPQNRKE

SEQ ID NO: 3666 - protein, 21 aa, Homo sapiens
  Table 3 sequence identifier: Q9NUQ6_C367
  MOD_RES (4)..(4): May or may not be conjugated to a chemical probe
RTPCSSLLPLLNAHAATSGKQ

SEQ ID NO: 3667 - protein, 13 aa, Homo sapiens
  Table 3 sequence identifier: Q5VWQ0_C282
  MOD_RES (7)..(7): May or may not be conjugated to a chemical probe
KEVQTVCAGLTRI

SEQ ID NO: 3668 - protein, 22 aa, Homo sapiens
  Table 3 sequence identifier: Q92835_C1050
  MOD_RES (7)..(7): May or may not be conjugated to a chemical probe
RKEPPPCPEPGILSPSIVLTKA

SEQ ID NO: 3669 - protein, 26 aa, Homo sapiens
  Table 3 sequence identifier: Q9Y6E0_C415
  MOD_RES (11)..(11): May or may not be conjugated to a chemical probe
RGAIYLAEEACPGISDTMVAQLVQRL

SEQ ID NO: 3670 - protein, 11 aa, Homo sapiens
  Table 3 sequence identifier: P49458_C39
  MOD_RES (8)..(8): May or may not be conjugated to a chemical probe
RHSDGNLCVKV

SEQ ID NO: 3671 - protein, 17 aa, Homo sapiens
  Table 3 sequence identifier: O43795_C613
  MOD_RES (12)..(12): May or may not be conjugated to a chemical probe
KAAHIFNEALVCHQIRY

SEQ ID NO: 3672 - protein, 24 aa, Homo sapiens
  Table 3 sequence identifier: Q9UPN3_C4429
  MOD_RES (22)..(22): May or may not be conjugated to a chemical probe
KTGSILPSVGSSVGSVNGYHTCKD

SEQ ID NO: 3673 - protein, 17 aa, Homo sapiens
  Table 3 sequence identifier: P16152_C122
  MOD_RES (4)..(4): May or may not be conjugated to a chemical probe
RDVCTELLPLIKPQGRV

SEQ ID NO: 3674 - protein, 32 aa, Homo sapiens
  Table 3 sequence identifier: Q9BWU0_C224
  MOD_RES (9)..(9): May or may not be conjugated to a chemical probe
RASGPDGECDSNGPGFYLYDLGSTHGTFLNKT

SEQ ID NO: 3675 - protein, 18 aa, Homo sapiens
  Table 3 sequence identifier: O75369_C2115
  MOD_RES (12)..(12): May or may not be conjugated to a chemical probe
RAPSVATVGSICDLNLKI

SEQ ID NO: 3676 - protein, 10 aa, Homo sapiens
  Table 3 sequence identifier: P48147_C255
  MOD_RES (4)..(4): May or may not be conjugated to a chemical probe
REGCDPVNRL

SEQ ID NO: 3677 - protein, 18 aa, Homo sapiens
  Table 3 sequence identifier: Q6PL24_C161
  MOD_RES (11)..(11): May or may not be conjugated to a chemical probe
KVSPPLMAPPCIWTFAKV

SEQ ID NO: 3678 - protein, 12 aa, Homo sapiens
  Table 3 sequence identifier: P21980_C10
  MOD_RES (2)..(2): May or may not be conjugated to a chemical probe
RCDLELETNGRD

SEQ ID NO: 3679 - protein, 13 aa, Homo sapiens
  Table 3 sequence identifier: Q16270_C59
  MOD_RES (6)..(6): May or may not be conjugated to a chemical probe
RDACGCCPMCARG

SEQ ID NO: 3680 - protein, 15 aa, Homo sapiens
  Table 3 sequence identifier: P25205_C446
  MOD_RES (2)..(2): May or may not be conjugated to a chemical probe
RCSVLAAANPVYGRY

SEQ ID NO: 3681 - protein, 23 aa, Homo sapiens
  Table 3 sequence identifier: Q16181_C280
  MOD_RES (16)..(16): May or may not be conjugated to a chemical probe
RQYPWGVAEVENGEHCDFTILRN

SEQ ID NO: 3682 - protein, 25 aa, Homo sapiens
  Table 3 sequence identifier: P83369_C52
  MOD_RES (12)..(12): May or may not be conjugated to a chemical probe
RLPPIPYPNAPCFNNVAEYESFLRT

SEQ ID NO: 3683 - protein, 23 aa, Homo sapiens
  Table 3 sequence identifier: Q01813_C123
  MOD_RES (7)..(7): May or may not be conjugated to a chemical probe
RGITNLCVIGGDGSLTGANLFRK

SEQ ID NO: 3684 - protein, 21 aa, Homo sapiens
  Table 3 sequence identifier: P49792_C3071
  MOD_RES (12)..(12): May or may not be conjugated to a chemical probe
KETNPVVFFDVCADGEPLGRI

SEQ ID NO: 3685 - protein, 23 aa, Homo sapiens
  Table 3 sequence identifier: O76031_C586
  MOD_RES (17)..(17): May or may not be conjugated to a chemical probe
KLLLEPMFEVPNSDIVCVEVDKE

SEQ ID NO: 3686 - protein, 33 aa, Homo sapiens
  Table 3 sequence identifier: Q5T2R2_C315
  MOD_RES (19)..(19): May or may not be conjugated to a chemical probe
KNVGIAFQLIDDVLDFTSCSDQMGKPTSADLKL

SEQ ID NO: 3687 - protein, 21 aa, Homo sapiens
  Table 3 sequence identifier: Q96T76_C356
  MOD_RES (19)..(19): May or may not be conjugated to a chemical probe
RADAEDLLDSFLSNILQDCRH

SEQ ID NO: 3688 - protein, 14 aa, Homo sapiens
  Table 3 sequence identifier: Q12996_C646
  MOD_RES (2)..(2): May or may not be conjugated to a chemical probe
RCKIPNTVEEAVRI

SEQ ID NO: 3689 - protein, 13 aa, Homo sapiens
  Table 3 sequence identifier: P35250_C255
  MOD_RES (3)..(3): May or may not be conjugated to a chemical probe
KVCDEPHPLLVKE

SEQ ID NO: 3690 - protein, 42 aa, Homo sapiens
  Table 3 sequence identifier: Q5VVQ6_C97
  MOD_RES (10)..(10): May or may not be conjugated to a chemical probe
RILVGYPPECLDLSNGDTILEDLPIQSGDMLIIEEDQTRPRS

SEQ ID NO: 3691 - protein, 9 aa, Homo sapiens
  Table 3 sequence identifier: Q9BXP5_C640
  MOD_RES (2)..(2): May or may not be conjugated to a chemical probe
RCGIIHVRG

SEQ ID NO: 3692 - protein, 19 aa, Homo sapiens
  Table 3 sequence identifier: P62701_C181
  MOD_RES (8)..(8): May or may not be conjugated to a chemical probe
KFDTGNLCMVTGGANLGRI

SEQ ID NO: 3693 - protein, 14 aa, Homo sapiens
  Table 3 sequence identifier: Q09028_C138
  MOD_RES (8)..(8): May or may not be conjugated to a chemical probe
RYMPQNPCIIATKT

SEQ ID NO: 3694 - protein, 14 aa, Homo sapiens
  Table 3 sequence identifier: Q8WXH0_C39
  MOD_RES (5)..(5): May or may not be conjugated to a chemical probe
KAFTCWINSQLARH

SEQ ID NO: 3695 - protein, 11 aa, Homo sapiens
  Table 3 sequence identifier: P62633_C111
  MOD_RES (3)..(3): May or may not be conjugated to a chemical probe
RDCDHADEQKC

SEQ ID NO: 3696 - protein, 13 aa, Homo sapiens
  Table 3 sequence identifier: Q8N4X5_C292
  MOD_RES (4)..(4): May or may not be conjugated to a chemical probe
RFNCQKPDIAEKY

SEQ ID NO: 3697 - protein, 10 aa, Homo sapiens
  Table 3 sequence identifier: Q9HAS0_C182
  MOD_RES (6)..(6): May or may not be conjugated to a chemical probe
KNNMNCEARG

SEQ ID NO: 3698 - protein, 23 aa, Homo sapiens
  Table 3 sequence identifier: O94806_C29
  MOD_RES (18)..(18): May or may not be conjugated to a chemical probe
KSVLPTAIPAVLPAASPCSSPKT

SEQ ID NO: 3699 - protein, 30 aa, Homo sapiens
  Table 3 sequence identifier: Q7Z6Z7_C2181
  MOD_RES (7)..(7): May or may not be conjugated to a chemical probe
RLQAVMCIISTIMESCPSTSSFYSSATAKT

SEQ ID NO: 3700 - protein, 11 aa, Homo sapiens
  Table 3 sequence identifier: P14598_C111
  MOD_RES (2)..(2): May or may not be conjugated to a chemical probe
RCPHLLDFFKV

SEQ ID NO: 3701 - protein, 16 aa, Homo sapiens
  Table 3 sequence identifier: P23193_C212
  MOD_RES (5)..(5): May or may not be conjugated to a chemical probe
KNVLCGNIPPDLFARM

SEQ ID NO: 3702 - protein, 13 aa, Homo sapiens
  Table 3 sequence identifier: P60953_C105
  MOD_RES (10)..(10): May or may not be conjugated to a chemical probe
KWVPEITHHCPKT

SEQ ID NO: 3703 - protein, 29 aa, Homo sapiens
  Table 3 sequence identifier: Q03426_C339
  MOD_RES (10)..(10): May or may not be conjugated to a chemical probe
KLTGAGGGGCGITLLKPGLEQPEVEATKQ

SEQ ID NO: 3704 - protein, 34 aa, Homo sapiens
  Table 3 sequence identifier: Q9H6S3_C358
  MOD_RES (26)..(26): May or may not be conjugated to a chemical probe
KHIQNPSAAELVHFLFGPLDLIVNTCSGPDIARS

SEQ ID NO: 3705 - protein, 26 aa, Homo sapiens
  Table 3 sequence identifier: P30566_C113
  MOD_RES (13)..(13): May or may not be conjugated to a chemical probe
KAAGIIHLGATSCYVGDNTDLIILRN

SEQ ID NO: 3706 - protein, 11 aa, Homo sapiens
  Table 3 sequence identifier: P51610_C352
  MOD_RES (8)..(8): May or may not be conjugated to a chemical probe
KAWNNQVCCKD

SEQ ID NO: 3707 - protein, 32 aa, Homo sapiens
  Table 3 sequence identifier: Q92616_C1275
  MOD_RES (2)..(2): May or may not be conjugated to a chemical probe
KCMLDAALATLNTHGKENVNSLLPVFEEFLKN

SEQ ID NO: 3708 - protein, 41 aa, Homo sapiens
  Table 3 sequence identifier: Q92616_C2469
  MOD_RES (27)..(27): May or may not be conjugated to a chemical probe
RISSAGCLGELCAFLTEEELSAVLQQCLLADVSGIDWMVRH

SEQ ID NO: 3709 - protein, 30 aa, Homo sapiens
  Table 3 sequence identifier: Q92614_C1080
  MOD_RES (16)..(16): May or may not be conjugated to a chemical probe
RVSSSSELDLPSGDHCEAGLLQLDVPLLRT

SEQ ID NO: 3710 - protein, 11 aa, Homo sapiens
  Table 3 sequence identifier: Q9BZK7_C434
  MOD_RES (4)..(4): May or may not be conjugated to a chemical probe
RGICIHTLTKH

SEQ ID NO: 3711 - protein, 17 aa, Homo sapiens
  Table 3 sequence identifier: P53618_C623
  MOD_RES (6)..(6): May or may not be conjugated to a chemical probe
KVLSECSPLMNDIFNKE

SEQ ID NO: 3712 - protein, 23 aa, Homo sapiens
  Table 3 sequence identifier: Q8TEX9_C42
  MOD_RES (10)..(10): May or may not be conjugated to a chemical probe
RAPAALPALCDLLASAADPQIRQ

SEQ ID NO: 3713 - protein, 9 aa, Homo sapiens
  Table 3 sequence identifier: P49327_C1548
  MOD_RES (4)..(4): May or may not be conjugated to a chemical probe
RWVCSSLRH

SEQ ID NO: 3714 - protein, 24 aa, Homo sapiens
  Table 3 sequence identifier: Q16875_C155
  MOD_RES (9)..(9): May or may not be conjugated to a chemical probe
KAFFIESVCDDPTVVASNIMEVKI

SEQ ID NO: 3715 - protein, 29 aa, Homo sapiens
  Table 3 sequence identifier: P20839_C331
  MOD_RES (10)..(10): May or may not be conjugated to a chemical probe
RVGMGCGSICITQEVMACGRPQGTAVYKV

SEQ ID NO: 3716 - protein, 49 aa, Homo sapiens
  Table 3 sequence identifier: P40926_C138
  MOD_RES (29)..(29): May or may not be conjugated to a chemical probe
RDDLFNTNATIVATLTAACAQHCPEAMICVIANPVNSTIPITAEVFKKH

SEQ ID NO: 3717 - protein, 10 aa, Homo sapiens
  Table 3 sequence identifier: P80297_C50
  MOD_RES (8)..(8): May or may not be conjugated to a chemical probe
KCAQGCICKG

SEQ ID NO: 3718 - protein, 16 aa, Homo sapiens
  Table 3 sequence identifier: Q12769_C1166
  MOD_RES (8)..(8): May or may not be conjugated to a chemical probe
KRNHDGECTAAPTNRQ

SEQ ID NO: 3719 - protein, 17 aa, Homo sapiens
  Table 3 sequence identifier: P48059_C100
  MOD_RES (5)..(5): May or may not be conjugated to a chemical probe
RCDLCQEVLADIGFVKN

SEQ ID NO: 3720 - protein, 17 aa, Homo sapiens
  Table 3 sequence identifier: Q8TBC4_C82
  MOD_RES (12)..(12): May or may not be conjugated to a chemical probe
KVLVIGAGGLGCELLKN

SEQ ID NO: 3721 - protein, 24 aa, Homo sapiens
  Table 3 sequence identifier: P26639_C107
  MOD_RES (9)..(9): May or may not be conjugated to a chemical probe
KTTPYQIACGISQGLADNTVIAKV

SEQ ID NO: 3722 - protein, 15 aa, Homo sapiens
  Table 3 sequence identifier: P13804_C53
  MOD_RES (8)..(8): May or may not be conjugated to a chemical probe
RLGGEVSCLVAGTKC

SEQ ID NO: 3723 - protein, 29 aa, Homo sapiens
  Table 3 sequence identifier: A6NE09_C148
  MOD_RES (21)..(21): May or may not be conjugated to a chemical probe
RADHQPLTEASYVNLPTIALCNTDSPLRY

SEQ ID NO: 3724 - protein, 18 aa, Homo sapiens
  Table 3 sequence identifier: Q12888_C513
  MOD_RES (16)..(16): May or may not be conjugated to a chemical probe
KNSPEDLGLSLTGDSCKL

SEQ ID NO: 3725 - protein, 12 aa, Homo sapiens
  Table 3 sequence identifier: Q02252_C368
  MOD_RES (3)..(3): May or may not be conjugated to a chemical probe
RVCNLIDSGTKE

SEQ ID NO: 3726 - protein, 18 aa, Homo sapiens
  Table 3 sequence identifier: P29144_C967
  MOD_RES (7)..(7): May or may not be conjugated to a chemical probe
KGAGPGCYLAGSLTLSKT

SEQ ID NO: 3727 - protein, 11 aa, Homo sapiens
  Table 3 sequence identifier: Q9H1B7_C63
  MOD_RES (5)..(5): May or may not be conjugated to a chemical probe
RAHGCFQDGRS

SEQ ID NO: 3728 - protein, 15 aa, Homo sapiens
  Table 3 sequence identifier: Q99836_C280
  MOD_RES (12)..(12): May or may not be conjugated to a chemical probe
RFITVCDYTNPCTKS

SEQ ID NO: 3729 - protein, 9 aa, Homo sapiens
  Table 3 sequence identifier: P43487_C158
  MOD_RES (7)..(7): May or may not be conjugated to a chemical probe
KTKFEECRK

SEQ ID NO: 3730 - protein, 21 aa, Homo sapiens
  Table 3 sequence identifier: Q6KC79_C304
  MOD_RES (16)..(16): May or may not be conjugated to a chemical probe
KGSRPPLILQSQSLPCSSPRD

SEQ ID NO: 3731 - protein, 17 aa, Homo sapiens
  Table 3 sequence identifier: Q9BTE3_C200
  MOD_RES (12)..(12): May or may not be conjugated to a chemical probe
RQAGSVGGLQWCGEPKR

SEQ ID NO: 3732 - protein, 45 aa, Homo sapiens
  Table 3 sequence identifier: P42574_C170
  MOD_RES (7)..(7): May or may not be conjugated to a chemical probe
RGTELDCGIETDSGVDDDMACHKIPVEADFLYAYSTAPGYYSWRN

SEQ ID NO: 3733 - protein, 26 aa, Homo sapiens
  Table 3 sequence identifier: Q9NPI6_C39
  MOD_RES (23)..(23): May or may not be conjugated to a chemical probe
KQHDPYITSIADLTGQVALYTFCPKA

SEQ ID NO: 3734 - protein, 14 aa, Homo sapiens
  Table 3 sequence identifier: O95425_C1101
  MOD_RES (4)..(4): May or may not be conjugated to a chemical probe
KNPCAMFAAGEIKT

SEQ ID NO: 3735 - protein, 13 aa, Homo sapiens
  Table 3 sequence identifier: Q9NS86_C169
  MOD_RES (4)..(4): May or may not be conjugated to a chemical probe
RSDCESQECVTKL

SEQ ID NO: 3736 - protein, 12 aa, Homo sapiens
  Table 3 sequence identifier: Q8NC60_C393
  MOD_RES (5)..(5): May or may not be conjugated to a chemical probe
KFPICNPTPYRM

SEQ ID NO: 3737 - protein, 40 aa, Homo sapiens
  Table 3 sequence identifier: O14773_C537
  MOD_RES (18)..(18): May or may not be conjugated to a chemical probe
RGCHESCLDEEVEGQGFCSGPGWDPVTGWGTPNFPALLKT

SEQ ID NO: 3738 - protein, 11 aa, Homo sapiens
  Table 3 sequence identifier: P61088_C87
  MOD_RES (3)..(3): May or may not be conjugated to a chemical probe
RICLDILKDKW

SEQ ID NO: 3739 - protein, 29 aa, Homo sapiens
  Table 3 sequence identifier: Q5JRX3_C241
  MOD_RES (18)..(18): May or may not be conjugated to a chemical probe
RLLPDHTYSVVSGGDPLCIPELTWEQLKQ

SEQ ID NO: 3740 - protein, 19 aa, Homo sapiens
  Table 3 sequence identifier: Q5JRX3_C869
  MOD_RES (16)..(16): May or may not be conjugated to a chemical probe
KTHFLMPFPVNYVGECIRT

SEQ ID NO: 3741 - protein, 11 aa, Homo sapiens
  Table 3 sequence identifier: Q9BRP1_C100
  MOD_RES (4)..(4): May or may not be conjugated to a chemical probe
RSQCLQVPERE

SEQ ID NO: 3742 - protein, 28 aa, Homo sapiens
  Table 3 sequence identifier: P61981_C194
  MOD_RES (23)..(23): May or may not be conjugated to a chemical probe
RLGLALNYSVFYYEIQNAPEQACHLAKT

SEQ ID NO: 3743 - protein, 13 aa, Homo sapiens
  Table 3 sequence identifier: P01871_C134
  MOD_RES (4)..(4): May or may not be conjugated to a chemical probe
KLICQATGFSPRQ

SEQ ID NO: 3744 - protein, 23 aa, Homo sapiens
  Table 3 sequence identifier: P01871_C451
  MOD_RES (22)..(22): May or may not be conjugated to a chemical probe
KSTGKPTLYNVSLVMSDTAGTCY

SEQ ID NO: 3745 - protein, 23 aa, Homo sapiens
  Table 3 sequence identifier: Q5T6F2_C104
  MOD_RES (21)..(21): May or may not be conjugated to a chemical probe
KAINILLEGNSDTTSWETVGCKK

SEQ ID NO: 3746 - protein, 17 aa, Homo sapiens
  Table 3 sequence identifier: Q96TA1_C154
  MOD_RES (2)..(2): May or may not be conjugated to a chemical probe
KCPTQFPLILWHPYARH

SEQ ID NO: 3747 - protein, 32 aa, Homo sapiens
  Table 3 sequence identifier: P31040_C305
  MOD_RES (24)..(24): May or may not be conjugated to a chemical probe
RAGLPCQDLEFVQFHPTGIYGAGCLITEGCRG

SEQ ID NO: 3748 - protein, 14 aa, Homo sapiens
  Table 3 sequence identifier: Q96CD2_C7
  MOD_RES (4)..(4): May or may not be conjugated to a chemical probe
KASCPAAAPLMERK

SEQ ID NO: 3749 - protein, 24 aa, Homo sapiens
  Table 3 sequence identifier: Q9NVU0_C553
  MOD_RES (16)..(16): May or may not be conjugated to a chemical probe
RAAGTDSFNGHPPQGCASTPVARE

SEQ ID NO: 3750 - protein, 20 aa, Homo sapiens
  Table 3 sequence identifier: Q92888_C911
  MOD_RES (19)..(19): May or may not be conjugated to a chemical probe
RLRPLLSQLGGNSVPQPGCT

SEQ ID NO: 3751 - protein, 23 aa, Homo sapiens
  Table 3 sequence identifier: Q15020_C537
  MOD_RES (5)..(5): May or may not be conjugated to a chemical probe
RAVQCTSDYPEHVCEVLLTMERT

SEQ ID NO: 3752 - protein, 37 aa, Homo sapiens
  Table 3 sequence identifier: Q15022_C46
  MOD_RES (7)..(7): May or may not be conjugated to a chemical probe
KSGGGSCGGGGSYSASSSSSAAAAAGAAVLPVKKPKM

SEQ ID NO: 3753 - protein, 17 aa, Homo sapiens
  Table 3 sequence identifier: Q9UQR0_C559
  MOD_RES (15)..(15): May or may not be conjugated to a chemical probe
KSSSLNSGNYLNPACRN

SEQ ID NO: 3754 - protein, 21 aa, Homo sapiens
  Table 3 sequence identifier: Q14315_C1653
  MOD_RES (16)..(16): May or may not be conjugated to a chemical probe
KCLVTVSIGGHGLGACLGPRI

SEQ ID NO: 3755 - protein, 19 aa, Homo sapiens
  Table 3 sequence identifier: O94925_C266
  MOD_RES (12)..(12): May or may not be conjugated to a chemical probe
KFSPDLWGVSVCTVDGQRH

SEQ ID NO: 3756 - protein, 25 aa, Homo sapiens
  Table 3 sequence identifier: Q8NFF5_C561
  MOD_RES (2)..(2): May or may not be conjugated to a chemical probe
KCLSPGGHPTYRPAYLLENEEEERN

SEQ ID NO: 3757 - protein, 23 aa, Homo sapiens
  Table 3 sequence identifier: Q99967_C261
  MOD_RES (21)..(21): May or may not be conjugated to a chemical probe
KELPELWLGQNEFDFMTDFVCKQ

SEQ ID NO: 3758 - protein, 17 aa, Homo sapiens
  Table 3 sequence identifier: Q9P287_C141
  MOD_RES (6)..(6): May or may not be conjugated to a chemical probe
RKGTQCVEQIQELVLRF

SEQ ID NO: 3759 - protein, 33 aa, Homo sapiens
  Table 3 sequence identifier: Q7LBC6_C529
  MOD_RES (7)..(7): May or may not be conjugated to a chemical probe
KNLFFQCMSQTLPTSNYFTTVSESLADDSSSRD

SEQ ID NO: 3760 - protein, 14 aa, Homo sapiens
  Table 3 sequence identifier: Q7LBC6_C569
  MOD_RES (12)..(12): May or may not be conjugated to a chemical probe
KQSLESLSSGLCKG

SEQ ID NO: 3761 - protein, 12 aa, Homo sapiens
  Table 3 sequence identifier: Q9UGU0_C868
  MOD_RES (5)..(5): May or may not be conjugated to a chemical probe
RSVICDISPLRQ

SEQ ID NO: 3762 - protein, 19 aa, Homo sapiens
  Table 3 sequence identifier: Q14683_C1073
  MOD_RES (5)..(5): May or may not be conjugated to a chemical probe
RFNACFESVATNIDEIYKA

SEQ ID NO: 3763 - protein, 10 aa, Homo sapiens
  Table 3 sequence identifier: P61513_C39
  MOD_RES (4)..(4): May or may not be conjugated to a chemical probe
KYTCSFCGKT

SEQ ID NO: 3764 - protein, 10 aa, Homo sapiens
  Table 3 sequence identifier: Q15796_C380
  MOD_RES (6)..(6): May or may not be conjugated to a chemical probe
KIPPGCNLKI

SEQ ID NO: 3765 - protein, 32 aa, Homo sapiens
  Table 3 sequence identifier: Q13547_C100
  MOD_RES (8)..(8): May or may not be conjugated to a chemical probe
RFNVGEDCPVFDGLFEFCQLSTGGSVASAVKL

SEQ ID NO: 3766 - protein, 10 aa, Homo sapiens
  Table 3 sequence identifier: Q9NZT2_C330
  MOD_RES (3)..(3): May or may not be conjugated to a chemical probe
RTCGPEHSKG

SEQ ID NO: 3767 - protein, 15 aa, Homo sapiens
  Table 3 sequence identifier: P55795_C22
  MOD_RES (7)..(7): May or may not be conjugated to a chemical probe
RGLPWSCSADEVMRF

SEQ ID NO: 3768 - protein, 20 aa, Homo sapiens
  Table 3 sequence identifier: P51812_C229
  MOD_RES (6)..(6): May or may not be conjugated to a chemical probe
KAYSFCGTVEYMAPEVVNRR

SEQ ID NO: 3769 - protein, 45 aa, Homo sapiens
  Table 3 sequence identifier: O15294_C158
  MOD_RES (42)..(42): May or may not be conjugated to a chemical probe
RLKPDFIDGYINLAAALVAAGDMEGAVQAYVSALQYNPDLYCVRS

SEQ ID NO: 3770 - protein, 14 aa, Homo sapiens
  Table 3 sequence identifier: Q08211_C242
  MOD_RES (7)..(7): May or may not be conjugated to a chemical probe
KLAAQSCALSLVRQ

SEQ ID NO: 3771 - protein, 52 aa, Homo sapiens
  Table 3 sequence identifier: O43823_C631
  MOD_RES (45)..(45): May or may not be conjugated to a chemical probe
RAVDGEGAPAPESSGEPAEDEGPTDTAEAGSDPQAEQLLEEQVPCGTAHEKG

SEQ ID NO: 3772 - protein, 31 aa, Homo sapiens
  Table 3 sequence identifier: O95819_C883
  MOD_RES (21)..(21): May or may not be conjugated to a chemical probe
RLLQISPSSGTTVTSVVGFSCDGMRPEAIRQ

SEQ ID NO: 3773 - protein, 15 aa, Homo sapiens
  Table 3 sequence identifier: Q96AE4_C332
  MOD_RES (2)..(2): May or may not be conjugated to a chemical probe
RCQHAAEIITDLLRS

SEQ ID NO: 3774 - protein, 16 aa, Homo sapiens
  Table 3 sequence identifier: Q99798_C592
  MOD_RES (2)..(2): May or may not be conjugated to a chemical probe
KCTTDHISAAGPWLKF

SEQ ID NO: 3775 - protein, 23 aa, Homo sapiens
  Table 3 sequence identifier: Q99797_C518
  MOD_RES (2)..(2): May or may not be conjugated to a chemical probe
RCPTDFAEVPSILMEYFANDYRV

SEQ ID NO: 3776 - protein, 17 aa, Homo sapiens
  Table 3 sequence identifier: O43776_C511
  MOD_RES (5)..(5): May or may not be conjugated to a chemical probe
KYGTCPHGGYGLGLERF

SEQ ID NO: 3777 - protein, 10 aa, Homo sapiens
  Table 3 sequence identifier: P35579_C931
  MOD_RES (2)..(2): May or may not be conjugated to a chemical probe
RCQHLQAEKK

SEQ ID NO: 3778 - protein, 23 aa, Homo sapiens
  Table 3 sequence identifier: Q9H078_C572
  MOD_RES (12)..(12): May or may not be conjugated to a chemical probe
RINEIVYFLPFCHSELIQLVNKE

SEQ ID NO: 3779 - protein, 18 aa, Homo sapiens
  Table 3 sequence identifier: Q02962_C52
  MOD_RES (13)..(13): May or may not be conjugated to a chemical probe
RIVELAHQGVRPCDISRQ

SEQ ID NO: 3780 - protein, 20 aa, Homo sapiens
  Table 3 sequence identifier: Q9NUG6_C60
  MOD_RES (12)..(12): May or may not be conjugated to a chemical probe
KDLSLSEDVMVCFGNMFIKM

SEQ ID NO: 3781 - protein, 19 aa, Homo sapiens
  Table 3 sequence identifier: P22692_C174
  MOD_RES (12)..(12): May or may not be conjugated to a chemical probe
REDARPVPQGSCQSELHRA

SEQ ID NO: 3782 - protein, 12 aa, Homo sapiens
  Table 3 sequence identifier: Q9BW19_C95
  MOD_RES (2)..(2): May or may not be conjugated to a chemical probe
RCSTAIATGLKN

SEQ ID NO: 3783 - protein, 20 aa, Homo sapiens
  Table 3 sequence identifier: P62879_C294
  MOD_RES (12)..(12): May or may not be conjugated to a chemical probe
RLLLAGYDDFNCNIWDAMKG

SEQ ID NO: 3784 - protein, 49 aa, Homo sapiens
  Table 3 sequence identifier: Q9C0C2_C631
  MOD_RES (24)..(24): May or may not be conjugated to a chemical probe
REAALPILEPVLGQEQPAAPDQPCVLFADAPEPGQALPVEEEAVTLARA

SEQ ID NO: 3785 - protein, 48 aa, Homo sapiens
  Table 3 sequence identifier: Q9UKG1_C462
  MOD_RES (39)..(39): May or may not be conjugated to a chemical probe
RTSSSGSLGSESTNLAALSLDSLVAPDTPIQFDIISPVCEDQPGQAKA

SEQ ID NO: 3786 - protein, 23 aa, Homo sapiens
  Table 3 sequence identifier: Q12841_C113
  MOD_RES (13)..(13): May or may not be conjugated to a chemical probe
KKSVSPSASPVVCYQSNRDELRR

SEQ ID NO: 3787 - protein, 21 aa, Homo sapiens
  Table 3 sequence identifier: O43837_C232
  MOD_RES (10)..(10): May or may not be conjugated to a chemical probe
KLGDGLFLQCCEEVAELYPKI

SEQ ID NO: 3788 - protein, 9 aa, Homo sapiens
  Table 3 sequence identifier: P22102_C291
  MOD_RES (7)..(7): May or may not be conjugated to a chemical probe
KVLEFNCRF

SEQ ID NO: 3789 - protein, 38 aa, Homo sapiens
  Table 3 sequence identifier: P22102_C322
  MOD_RES (17)..(17): May or may not be conjugated to a chemical probe
KSDLYEVIQSTLDGLLCTSLPVWLENHTALTVVMASKG

SEQ ID NO: 3790 - protein, 11 aa, Homo sapiens
  Table 3 sequence identifier: P46940_C1534
  MOD_RES (3)..(3): May or may not be conjugated to a chemical probe
KTCLDNLASKG

SEQ ID NO: 3791 - protein, 11 aa, Homo sapiens
  Table 3 sequence identifier: P11586_C326
  MOD_RES (3)..(3): May or may not be conjugated to a chemical probe
RSCKPKPIGKL

SEQ ID NO: 3792 - protein, 53 aa, Homo sapiens
  Table 3 sequence identifier: P27816_C181
  MOD_RES (9)..(9): May or may not be conjugated to a chemical probe
KDSYGMSPCNTAVVPQGWSVEALNSPHSESFVSPEAVAEPPQPTAVPLELAKE

SEQ ID NO: 3793 - protein, 9 aa, Homo sapiens
  Table 3 sequence identifier: Q9NR46_C252
  MOD_RES (2)..(2): May or may not be conjugated to a chemical probe
RCLHEFVKS

SEQ ID NO: 3794 - protein, 9 aa, Homo sapiens
  Table 3 sequence identifier: P55060_C387
  MOD_RES (4)..(4): May or may not be conjugated to a chemical probe
RAACDLVRG

SEQ ID NO: 3795 - protein, 21 aa, Homo sapiens
  Table 3 sequence identifier: Q9UQ80_C179
  MOD_RES (8)..(8): May or may not be conjugated to a chemical probe
KVAHSFNCTPIEGMLSHQLKQ

SEQ ID NO: 3796 - protein, 27 aa, Homo sapiens
  Table 3 sequence identifier: Q9NQR4_C170
  MOD_RES (3)..(3): May or may not be conjugated to a chemical probe
RGCQLLVYPGAFNLTTGPAHWELLQRS

SEQ ID NO: 3797 - protein, 21 aa, Homo sapiens
  Table 3 sequence identifier: P52306_C85
  MOD_RES (4)..(4): May or may not be conjugated to a chemical probe
RIPCVDAGLISPLVQLLNSKD

SEQ ID NO: 3798 - protein, 19 aa, Homo sapiens
  Table 3 sequence identifier: O00571_C298
  MOD_RES (5)..(5): May or may not be conjugated to a chemical probe
RVRPCVVYGGADIGQQIRD

SEQ ID NO: 3799 - protein, 23 aa, Homo sapiens
  Table 3 sequence identifier: Q7L5N1_C283
  MOD_RES (8)..(8): May or may not be conjugated to a chemical probe
KTDFYDQCNDVGLMAYLGTITKT

SEQ ID NO: 3800 - protein, 19 aa, Homo sapiens
  Table 3 sequence identifier: Q01082_C604
  MOD_RES (12)..(12): May or may not be conjugated to a chemical probe
KFATDGEGYKPCDPQVIRD

SEQ ID NO: 3801 - protein, 21 aa, Homo sapiens
  Table 3 sequence identifier: O43719_C480
  MOD_RES (8)..(8): May or may not be conjugated to a chemical probe
KRGFEGSCSQKESEEGNPVRG

SEQ ID NO: 3802 - protein, 11 aa, Homo sapiens
  Table 3 sequence identifier: Q9NPB8_C640
  MOD_RES (3)..(3): May or may not be conjugated to a chemical probe
KSCLCPTVSRF

SEQ ID NO: 3803 - protein, 19 aa, Homo sapiens
  Table 3 sequence identifier: P34932_C417
  MOD_RES (13)..(13): May or may not be conjugated to a chemical probe
RWNSPAEEGSSDCEVFSKN

SEQ ID NO: 3804 - protein, 18 aa, Homo sapiens
  Table 3 sequence identifier: P34932_C779
  MOD_RES (7)..(7): May or may not be conjugated to a chemical probe
KELTSTCSPIISKPKPKV

SEQ ID NO: 3805 - protein, 20 aa, Homo sapiens
  Table 3 sequence identifier: P21291_C58
  MOD_RES (18)..(18): May or may not be conjugated to a chemical probe
KKNLDSTTVAVHGEEIYCKS

SEQ ID NO: 3806 - protein, 18 aa, Homo sapiens
  Table 3 sequence identifier: Q9UHR5_C172
  MOD_RES (6)..(6): May or may not be conjugated to a chemical probe
KLIQFCAIDELGTNYPKD

SEQ ID NO: 3807 - protein, 25 aa, Homo sapiens
  Table 3 sequence identifier: P31937_C211
  MOD_RES (3)..(3): May or may not be conjugated to a chemical probe
KICNNMLLAISMIGTAEAMNLGIRL

SEQ ID NO: 3808 - protein, 17 aa, Homo sapiens
  Table 3 sequence identifier: P04843_C477
  MOD_RES (4)..(4): May or may not be conjugated to a chemical probe
KVACITEQVLTLVNKRI

SEQ ID NO: 3809 - protein, 15 aa, Homo sapiens
  Table 3 sequence identifier: Q14980_C658
  MOD_RES (9)..(9): May or may not be conjugated to a chemical probe
RKVEELQACVETARQ

SEQ ID NO: 3810 - protein, 17 aa, Homo sapiens
  Table 3 sequence identifier: Q9BYV8_C171
  MOD_RES (8)..(8): May or may not be conjugated to a chemical probe
KDKPYPDCPFLLLDVRD

SEQ ID NO: 3811 - protein, 35 aa, Homo sapiens
  Table 3 sequence identifier: Q8IUC6_C485
  MOD_RES (7)..(7): May or may not be conjugated to a chemical probe
RQGSPDCVIPFLPLESSPAQLSSDTASLLSGLVRL

SEQ ID NO: 3812 - protein, 13 aa, Homo sapiens
  Table 3 sequence identifier: Q08378_C769
  MOD_RES (6)..(6): May or may not be conjugated to a chemical probe
REDTICLLQNEKI

SEQ ID NO: 3813 - protein, 12 aa, Homo sapiens
  Table 3 sequence identifier: Q12912_C72
  MOD_RES (3)..(3): May or may not be conjugated to a chemical probe
RVCPESLLQSRE

SEQ ID NO: 3814 - protein, 7 aa, Homo sapiens
  Table 3 sequence identifier: Q9UBD5_C711
  MOD_RES (7)..(7): May or may not be conjugated to a chemical probe
RLTWGGC

SEQ ID NO: 3815 - protein, 15 aa, Homo sapiens
  Table 3 sequence identifier: O00743_C262
  MOD_RES (12)..(12): May or may not be conjugated to a chemical probe
KLVTVWSAPNYCYRC

SEQ ID NO: 3816 - protein, 10 aa, Homo sapiens
  Table 3 sequence identifier: Q6P1J9_C145
  MOD_RES (7)..(7): May or may not be conjugated to a chemical probe
RIEDEECVRL

SEQ ID NO: 3817 - protein, 17 aa, Homo sapiens
  Table 3 sequence identifier: Q1KMD3_C518
  MOD_RES (13)..(13): May or may not be conjugated to a chemical probe
KSRDLLVQQASQCLSKL

SEQ ID NO: 3818 - protein, 11 aa, Homo sapiens
  Table 3 sequence identifier: Q9P2J5_C70
  MOD_RES (2)..(2): May or may not be conjugated to a chemical probe
KCEFAVGYQRL

SEQ ID NO: 3819 - protein, 18 aa, Homo sapiens
  Table 3 sequence identifier: Q9P2J5_C83
  MOD_RES (2)..(2): May or may not be conjugated to a chemical probe
KCCLFPFGLHCTGMPIKA

SEQ ID NO: 3820 - protein, 9 aa, Homo sapiens
  Table 3 sequence identifier: P14678_C19
  MOD_RES (2)..(2): May or may not be conjugated to a chemical probe
RCILQDGRI

SEQ ID NO: 3821 - protein, 13 aa, Homo sapiens
  Table 3 sequence identifier: Q9H845_C613
  MOD_RES (6)..(6): May or may not be conjugated to a chemical probe
KRAYICAHPLDRT

SEQ ID NO: 3822 - protein, 15 aa, Homo sapiens
  Table 3 sequence identifier: Q6KB66_C49
  MOD_RES (6)..(6): May or may not be conjugated to a chemical probe
RSLTGCWSAGTISKV

SEQ ID NO: 3823 - protein, 11 aa, Homo sapiens
  Table 3 sequence identifier: O43143_C190
  MOD_RES (6)..(6): May or may not be conjugated to a chemical probe
KRGVACTQPRR

SEQ ID NO: 3824 - protein, 15 aa, Homo sapiens
  Table 3 sequence identifier: P67775_C20
  MOD_RES (13)..(13): May or may not be conjugated to a chemical probe
KELDQWIEQLNECKQ

SEQ ID NO: 3825 - protein, 35 aa, Homo sapiens
  Table 3 sequence identifier: P04062_C287
  MOD_RES (25)..(25): May or may not be conjugated to a chemical probe
KLQFWAVTAENEPSAGLLSGYPFQCLGFTPEHQRD

SEQ ID NO: 3826 - protein, 13 aa, Homo sapiens
  Table 3 sequence identifier: Q05086_C108
  MOD_RES (8)..(8): May or may not be conjugated to a chemical probe
KGAPNNSCSEIKM

SEQ ID NO: 3827 - protein, 9 aa, Homo sapiens
  Table 3 sequence identifier: Q9NPA8_C40
  MOD_RES (5)..(5): May or may not be conjugated to a chemical probe
KLIECGWKD

SEQ ID NO: 3828 - protein, 10 aa, Homo sapiens
  Table 3 sequence identifier: Q9NWZ3_C13
  MOD_RES (2)..(2): May or may not be conjugated to a chemical probe
RCLNVGLIRK

SEQ ID NO: 3829 - protein, 30 aa, Homo sapiens
  Table 3 sequence identifier: Q03001_C2128
  MOD_RES (9)..(9): May or may not be conjugated to a chemical probe
KVNSSPSVCVPSLISYLTQTELADISMLRS

SEQ ID NO: 3830 - protein, 20 aa, Homo sapiens
  Table 3 sequence identifier: P48634_C437
  MOD_RES (6)..(6): May or may not be conjugated to a chemical probe
RGGPPCKPPAPEDEDEAWRQ

SEQ ID NO: 3831 - protein, 34 aa, Homo sapiens
  Table 3 sequence identifier: P55196_C1206
  MOD_RES (11)..(11): May or may not be conjugated to a chemical probe
KITSVSTGNLCTEEQTPPPRPEAYPIPTQTYTRE

SEQ ID NO: 3832 - protein, 18 aa, Homo sapiens
  Table 3 sequence identifier: P55196_C1684
  MOD_RES (11)..(11): May or may not be conjugated to a chemical probe
RLLEPEAPGLCRPPLPRD

SEQ ID NO: 3833 - protein, 26 aa, Homo sapiens
  Table 3 sequence identifier: Q9P0W2_C177
  MOD_RES (5)..(5): May or may not be conjugated to a chemical probe
KGGDCDGFSTFDVPIFTEEFLDQNKA

SEQ ID NO: 3834 - protein, 14 aa, Homo sapiens
  Table 3 sequence identifier: Q8WWI1_C261
  MOD_RES (6)..(6): May or may not be conjugated to a chemical probe
RSLTSCSSDITLRG

SEQ ID NO: 3835 - protein, 15 aa, Homo sapiens
  Table 3 sequence identifier: P49903_C71
  MOD_RES (9)..(9): May or may not be conjugated to a chemical probe
RLGIGMDTCVIPLRH

SEQ ID NO: 3836 - protein, 23 aa, Homo sapiens
  Table 3 sequence identifier: P52435_C31
  MOD_RES (6)..(6): May or may not be conjugated to a chemical probe
KVPNACLFTINKEDHTLGNIIKS

SEQ ID NO: 3837 - protein, 10 aa, Homo sapiens
  Table 3 sequence identifier: O43865_C292
  MOD_RES (7)..(7): May or may not be conjugated to a chemical probe
KFDNLYCCRE

SEQ ID NO: 3838 - protein, 19 aa, Homo sapiens
  Table 3 sequence identifier: Q92900_C188
  MOD_RES (17)..(17): May or may not be conjugated to a chemical probe
KDGPLGETVLECYNCGCRN

SEQ ID NO: 3839 - protein, 15 aa, Homo sapiens
  Table 3 sequence identifier: Q92871_C57
  MOD_RES (13)..(13): May or may not be conjugated to a chemical probe
RVQIGVVGGSDYCKI

SEQ ID NO: 3840 - protein, 46 aa, Homo sapiens
  Table 3 sequence identifier: Q15942_C433
  MOD_RES (35)..(35): May or may not be conjugated to a chemical probe
RALGQLFHIACFTCHQCAQQLQGQQFYSLEGAPYCEGCYTDTLEKC

SEQ ID NO: 3841 - protein, 10 aa, Homo sapiens
  Table 3 sequence identifier: Q6UB35_C61
  MOD_RES (4)..(4): May or may not be conjugated to a chemical probe
RSSCSPGGRT

SEQ ID NO: 3842 - protein, 12 aa, Homo sapiens
  Table 3 sequence identifier: Q9BZF9_C980
  MOD_RES (9)..(9): May or may not be conjugated to a chemical probe
KELDTIQECIKV

SEQ ID NO: 3843 - protein, 27 aa, Homo sapiens
  Table 3 sequence identifier: Q9NYQ6_C1840
  MOD_RES (3)..(3): May or may not be conjugated to a chemical probe
RGCMQGVRMGGTPTNVATLNMNNALKV

SEQ ID NO: 3844 - protein, 18 aa, Homo sapiens
  Table 3 sequence identifier: O14936_C633
  MOD_RES (16)..(16): May or may not be conjugated to a chemical probe
RAQFEYDPAKDDLIPCKE

SEQ ID NO: 3845 - protein, 20 aa, Homo sapiens
  Table 3 sequence identifier: Q96C36_C95
  MOD_RES (7)..(7): May or may not be conjugated to a chemical probe
RHIVVSCAAGVTISSVEKKL

SEQ ID NO: 3846 - protein, 43 aa, Homo sapiens
  Table 3 sequence identifier: Q2T9J0_C240
  MOD_RES (26)..(26): May or may not be conjugated to a chemical probe
KGAPLLVCGSPFGAFCPDIFLNTLSCGVLSNVAGPLLLTDARC

SEQ ID NO: 3847 - protein, 14 aa, Homo sapiens
  Table 3 sequence identifier: O14980_C119
  MOD_RES (8)..(8): May or may not be conjugated to a chemical probe
KTSSDPTCVEKEKV

SEQ ID NO: 3848 - protein, 10 aa, Homo sapiens
  Table 3 sequence identifier: P31948_C471
  MOD_RES (2)..(2): May or may not be conjugated to a chemical probe
RCMMAQYNRH

SEQ ID NO: 3849 - protein, 18 aa, Homo sapiens
  Table 3 sequence identifier: Q9Y2L1_C194
  MOD_RES (12)..(12): May or may not be conjugated to a chemical probe
KAIEEGIPAFTCEEYVKS

SEQ ID NO: 3850 - protein, 14 aa, Homo sapiens
  Table 3 sequence identifier: Q96EB1_C412
  MOD_RES (6)..(6): May or may not be conjugated to a chemical probe
RLGPGCGMMAGGKK

SEQ ID NO: 3851 - protein, 15 aa, Homo sapiens
  Table 3 sequence identifier: P23921_C254
  MOD_RES (12)..(12): May or may not be conjugated to a chemical probe
KSAGGIGVAVSCIRA

SEQ ID NO: 3852 - protein, 20 aa, Homo sapiens
  Table 3 sequence identifier: Q12802_C1232
  MOD_RES (8)..(8): May or may not be conjugated to a chemical probe
RSTPSLPCMVSAQDAPLPKG

SEQ ID NO: 3853 - protein, 17 aa, Homo sapiens
  Table 3 sequence identifier: Q13404_C144
  MOD_RES (14)..(14): May or may not be conjugated to a chemical probe
KENMKLPQPPEGQCYSN

SEQ ID NO: 3854 - protein, 26 aa, Homo sapiens
  Table 3 sequence identifier: Q8TDX7_C224
  MOD_RES (9)..(9): May or may not be conjugated to a chemical probe
KSDIWSLGCLLYEMAALQSPFYGDKM

SEQ ID NO: 3855 - protein, 15 aa, Homo sapiens
  Table 3 sequence identifier: P27708_C2092
  MOD_RES (8)..(8): May or may not be conjugated to a chemical probe
RTVHSLACLLTQYRV

SEQ ID NO: 3856 - protein, 24 aa, Homo sapiens
  Table 3 sequence identifier: Q9Y4B6_C1227
  MOD_RES (3)..(3): May or may not be conjugated to a chemical probe
RNCATFNPTDDLVLNDGVLWDVRS

SEQ ID NO: 3857 - protein, 12 aa, Homo sapiens
  Table 3 sequence identifier: P23497_C96
  MOD_RES (10)..(10): May or may not be conjugated to a chemical probe
KMFEDSQDSCRN

SEQ ID NO: 3858 - protein, 28 aa, Homo sapiens
  Table 3 sequence identifier: O75592_C2163
  MOD_RES (26)..(26): May or may not be conjugated to a chemical probe
KDLALPIGNELEEDLEILEEAALQVCKT

SEQ ID NO: 3859 - protein, 16 aa, Homo sapiens
  Table 3 sequence identifier: Q12962_C174
  MOD_RES (14)..(14): May or may not be conjugated to a chemical probe
KFISDIANDALQHCKM

SEQ ID NO: 3860 - protein, 24 aa, Homo sapiens
  Table 3 sequence identifier: Q99700_C556
  MOD_RES (13)..(13): May or may not be conjugated to a chemical probe
RVVNGGVPWPSPCPSPSSRPPSRY

SEQ ID NO: 3861 - protein, 9 aa, Homo sapiens
  Table 3 sequence identifier: Q9Y5L0_C912
  MOD_RES (4)..(4): May or may not be conjugated to a chemical probe
KQVCWALRD

SEQ ID NO: 3862 - protein, 30 aa, Homo sapiens
  Table 3 sequence identifier: A1KXE4_C63
  MOD_RES (4)..(4): May or may not be conjugated to a chemical probe
KVSCSPTSGAVPPYSSSPNPYQTAVYPVRS

SEQ ID NO: 3863 - protein, 10 aa, Homo sapiens
  Table 3 sequence identifier: Q13671_C284
  MOD_RES (5)..(5): May or may not be conjugated to a chemical probe
RLPPCQLLRR

SEQ ID NO: 3864 - protein, 9 aa, Homo sapiens
  Table 3 sequence identifier: P62913_C150
  MOD_RES (4)..(4): May or may not be conjugated to a chemical probe
RTGCIGAKH

SEQ ID NO: 3865 - protein, 10 aa, Homo sapiens
  Table 3 sequence identifier: Q9H832_C100
  MOD_RES (6)..(6): May or may not be conjugated to a chemical probe
RTAPQCLLRI

SEQ ID NO: 3866 - protein, 17 aa, Homo sapiens
  Table 3 sequence identifier: Q00796_C301
  MOD_RES (3)..(3): May or may not be conjugated to a chemical probe
RYCNTWPVAISMLASKS

SEQ ID NO: 3867 - protein, 24 aa, Homo sapiens
  Table 3 sequence identifier: P00491_C206
  MOD_RES (22)..(22): May or may not be conjugated to a chemical probe
RELQEGTYVMVAGPSFETVAECRV

SEQ ID NO: 3868 - protein, 13 aa, Homo sapiens
  Table 3 sequence identifier: Q9Y5U2_C99
  MOD_RES (6)..(6): May or may not be conjugated to a chemical probe
RDIFDCLEGAARR

SEQ ID NO: 3869 - protein, 10 aa, Homo sapiens
  Table 3 sequence identifier: O96017_C539
  MOD_RES (6)..(6): May or may not be conjugated to a chemical probe
KRPAVCAAVL

SEQ ID NO: 3870 - protein, 20 aa, Homo sapiens
  Table 3 sequence identifier: O96019_C152
  MOD_RES (18)..(18): May or may not be conjugated to a chemical probe
KLTELMFEHYNIPAFFLCKT

SEQ ID NO: 3871 - protein, 30 aa, Homo sapiens
  Table 3 sequence identifier: P52701_C694
  MOD_RES (2)..(2): May or may not be conjugated to a chemical probe
KCLIDQELLSMANFEEYIPLDSDTVSTTRS

SEQ ID NO: 3872 - protein, 39 aa, Homo sapiens
  Table 3 sequence identifier: P26440_C378
  MOD_RES (24)..(24): May or may not be conjugated to a chemical probe
KDCAGVILYSAECATQVALDGIQCFGGNGYINDFPMGRF

SEQ ID NO: 3873 - protein, 18 aa, Homo sapiens
  Table 3 sequence identifier: Q16543_C308
  MOD_RES (2)..(2): May or may not be conjugated to a chemical probe
KCFDVKDVQMLQDAISKM

SEQ ID NO: 3874 - protein, 13 aa, Homo sapiens
  Table 3 sequence identifier: Q9NUW8_C135
  MOD_RES (10)..(10): May or may not be conjugated to a chemical probe
RTENHGAPACHRL

SEQ ID NO: 3875 - protein, 19 aa, Homo sapiens
  Table 3 sequence identifier: Q14139_C79
  MOD_RES (7)..(7): May or may not be conjugated to a chemical probe
RSQQEICEQLNINHMIQRI

SEQ ID NO: 3876 - protein, 11 aa, Homo sapiens
  Table 3 sequence identifier: Q96FV9_C49
  MOD_RES (3)..(3): May or may not be conjugated to a chemical probe
KKCTLDQAFRG

SEQ ID NO: 3877 - protein, 13 aa, Homo sapiens
  Table 3 sequence identifier: P33992_C397
  MOD_RES (2)..(2): May or may not be conjugated to a chemical probe
KCSPIGVYTSGKG

SEQ ID NO: 3878 - protein, 49 aa, Homo sapiens
  Table 3 sequence identifier: Q15417_C273
  MOD_RES (3)..(3): May or may not be conjugated to a chemical probe
KYCAAPTEPVIHNGSQGTGTNGSEISDSDYQAEYPDEYHGEYQDDYPRD

SEQ ID NO: 3879 - protein, 26 aa, Homo sapiens
  Table 3 sequence identifier: P41567_C69
  MOD_RES (4)..(4): May or may not be conjugated to a chemical probe
KFACNGTVIEHPEYGEVIQLQGDQRK

SEQ ID NO: 3880 - protein, 14 aa, Homo sapiens
  Table 3 sequence identifier: P30626_C162
  MOD_RES (10)..(10): May or may not be conjugated to a chemical probe
KITFDDYIACCVKL

SEQ ID NO: 3881 - protein, 21 aa, Homo sapiens
  Table 3 sequence identifier: A6NHR9_C1433
  MOD_RES (18)..(18): May or may not be conjugated to a chemical probe
KLSTSGNRPPANAETFSCNKI

SEQ ID NO: 3882 - protein, 10 aa, Homo sapiens
  Table 3 sequence identifier: O00410_C348
  MOD_RES (4)..(4): May or may not be conjugated to a chemical probe
RMACGLGGKL

SEQ ID NO: 3883 - protein, 16 aa, Homo sapiens
  Table 3 sequence identifier: O00410_C560
  MOD_RES (5)..(5): May or may not be conjugated to a chemical probe
KTIECISLIGLAVGKE

SEQ ID NO: 3884 - protein, 37 aa, Homo sapiens
  Table 3 sequence identifier: O60563_C630
  MOD_RES (35)..(35): May or may not be conjugated to a chemical probe
KSSSLNFSFPSLPTMGQMPGHSSDTSGLSFSQPSCKT

SEQ ID NO: 3885 - protein, 10 aa, Homo sapiens
  Table 3 sequence identifier: P35580_C678
  MOD_RES (2)..(2): May or may not be conjugated to a chemical probe
RCIIPNHEKR

SEQ ID NO: 3886 - protein, 11 aa, Homo sapiens
  Table 3 sequence identifier: P60228_C345
  MOD_RES (9)..(9): May or may not be conjugated to a chemical probe
RLFIFETFCRI

SEQ ID NO: 3887 - protein, 24 aa, Homo sapiens
  Table 3 sequence identifier: P49116_C387
  MOD_RES (18)..(18): May or may not be conjugated to a chemical probe
KLTMPSPMPEYLNVHYICESASRL

SEQ ID NO: 3888 - protein, 22 aa, Homo sapiens
  Table 3 sequence identifier: P42330_C242
  MOD_RES (17)..(17): May or may not be conjugated to a chemical probe
RWVDPNSPVLLEDPVLCALAKK

SEQ ID NO: 3889 - protein, 12 aa, Homo sapiens
  Table 3 sequence identifier: O60271_C1155
  MOD_RES (9)..(9): May or may not be conjugated to a chemical probe
RITALMVSCNRL

SEQ ID NO: 3890 - protein, 21 aa, Homo sapiens
  Table 3 sequence identifier: Q96FA3_C61
  MOD_RES (14)..(14): May or may not be conjugated to a chemical probe
KANGVKPSTVHIACTPQAAKA

SEQ ID NO: 3891 - protein, 17 aa, Homo sapiens
  Table 3 sequence identifier: Q96IF1_C224
  MOD_RES (12)..(12): May or may not be conjugated to a chemical probe
RLYAQRPAGFGCQESRH

SEQ ID NO: 3892 - protein, 20 aa, Homo sapiens
  Table 3 sequence identifier: Q9ULK4_C297
  MOD_RES (2)..(2): May or may not be conjugated to a chemical probe
RCPVLEDQLVDLVVYAMERS

SEQ ID NO: 3893 - protein, 12 aa, Homo sapiens
  Table 3 sequence identifier: Q9ULK4_C1319
  MOD_RES (4)..(4): May or may not be conjugated to a chemical probe
KIICNLKPALKL

SEQ ID NO: 3894 - protein, 19 aa, Homo sapiens
  Table 3 sequence identifier: O00622_C359
  MOD_RES (6)..(6): May or may not be conjugated to a chemical probe
KCNYNCPHANEAAFPFYRL

SEQ ID NO: 3895 - protein, 27 aa, Homo sapiens
  Table 3 sequence identifier: O95985_C217
  MOD_RES (15)..(15): May or may not be conjugated to a chemical probe
KYGDLDSSLISFGPCQTPTLGFCVERH

SEQ ID NO: 3896 - protein, 20 aa, Homo sapiens
  Table 3 sequence identifier: P33240_C62
  MOD_RES (6)..(6): May or may not be conjugated to a chemical probe
KGYGFCEYQDQETALSAMRN

SEQ ID NO: 3897 - protein, 10 aa, Homo sapiens
  Table 3 sequence identifier: P52272_C694
  MOD_RES (5)..(5): May or may not be conjugated to a chemical probe
KSKGCGVVKF

SEQ ID NO: 3898 - protein, 15 aa, Homo sapiens
  Table 3 sequence identifier: A0AVT1_C721
  MOD_RES (8)..(8): May or may not be conjugated to a chemical probe
KALQLLHCFPLDIRL

SEQ ID NO: 3899 - protein, 10 aa, Homo sapiens
  Table 3 sequence identifier: Q9BZG1_C116
  MOD_RES (2)..(2): May or may not be conjugated to a chemical probe
KCIASTYYRG

SEQ ID NO: 3900 - protein, 13 aa, Homo sapiens
  Table 3 sequence identifier: P53384_C25
  MOD_RES (8)..(8): May or may not be conjugated to a chemical probe
RGASCQGCPNQRL

SEQ ID NO: 3901 - protein, 21 aa, Homo sapiens
  Table 3 sequence identifier: Q15181_C114
  MOD_RES (6)..(6): May or may not be conjugated to a chemical probe
KHTGCCGDNDPIDVCEIGSKV

SEQ ID NO: 3902 - protein, 30 aa, Homo sapiens
  Table 3 sequence identifier: Q9NPF4_C73
  MOD_RES (24)..(24): May or may not be conjugated to a chemical probe
RAVILDLLQEALTESGLTSQDIDCIAYTKG

SEQ ID NO: 3903 - protein, 23 aa, Homo sapiens
  Table 3 sequence identifier: Q96FF9_C195
  MOD_RES (3)..(3): May or may not be conjugated to a chemical probe
RVCAKPWAPDMTLPGISPPPEKQ

SEQ ID NO: 3904 - protein, 18 aa, Homo sapiens
  Table 3 sequence identifier: Q8NFC6_C74
  MOD_RES (3)..(3): May or may not be conjugated to a chemical probe
RDCLADVDTKPAYQNLRQ

SEQ ID NO: 3905 - protein, 21 aa, Homo sapiens
  Table 3 sequence identifier: Q9UPN7_C37
  MOD_RES (19)..(19): May or may not be conjugated to a chemical probe
REDLSLPELLDEEDVLQECKV

SEQ ID NO: 3906 - protein, 14 aa, Homo sapiens
  Table 3 sequence identifier: Q9UPN9_C447
  MOD_RES (2)..(2): May or may not be conjugated to a chemical probe
RCDPVPAANGAIRF

SEQ ID NO: 3907 - protein, 11 aa, Homo sapiens
  Table 3 sequence identifier: J3QR44_C422
  MOD_RES (9)..(9): May or may not be conjugated to a chemical probe
KYLPALQGCRS

SEQ ID NO: 3908 - protein, 44 aa, Homo sapiens
  Table 3 sequence identifier: Q641Q2_C594
  MOD_RES (38)..(38): May or may not be conjugated to a chemical probe
KGASLLPGKLPTLVSLFDDEDEEDNLFGGTAAKKQTLCLQAQRE

SEQ ID NO: 3909 - protein, 15 aa, Homo sapiens
  Table 3 sequence identifier: O75362_C641
  MOD_RES (13)..(13): May or may not be conjugated to a chemical probe
RSAVETQANNLICRT

SEQ ID NO: 3910 - protein, 10 aa, Homo sapiens
  Table 3 sequence identifier: P78406_C106
  MOD_RES (7)..(7): May or may not be conjugated to a chemical probe
KVFTASCDKT

SEQ ID NO: 3911 - protein, 17 aa, Homo sapiens
  Table 3 sequence identifier: Q6P2I3_C215
  MOD_RES (7)..(7): May or may not be conjugated to a chemical probe
KTFDTFCPLGPALVTKD

SEQ ID NO: 3912 - protein, 35 aa, Homo sapiens
  Table 3 sequence identifier: P49770_C310
  MOD_RES (6)..(6): May or may not be conjugated to a chemical probe
KVSVHCPVFDYVPPELITLFISNIGGNAPSYIYRL

SEQ ID NO: 3913 - protein, 20 aa, Homo sapiens
  Table 3 sequence identifier: Q9Y5A9_C482
  MOD_RES (9)..(9): May or may not be conjugated to a chemical probe
KSAVDYNTCAGVWSQDKWKG

SEQ ID NO: 3914 - protein, 14 aa, Homo sapiens
  Table 3 sequence identifier: P25205_C319
  MOD_RES (5)..(5): May or may not be conjugated to a chemical probe
KAILCLLLGGVERD

SEQ ID NO: 3915 - protein, 14 aa, Homo sapiens
  Table 3 sequence identifier: P36959_C186
  MOD_RES (10)..(10): May or may not be conjugated to a chemical probe
KVGVGPGSVCTTRT

SEQ ID NO: 3916 - protein, 10 aa, Homo sapiens
  Table 3 sequence identifier: O00273_C165
  MOD_RES (4)..(4): May or may not be conjugated to a chemical probe
RQSCATVQRL

SEQ ID NO: 3917 - protein, 20 aa, Homo sapiens
  Table 3 sequence identifier: P49790_C593
  MOD_RES (8)..(8): May or may not be conjugated to a chemical probe
KKTPPEDCEGPFRPAEILKE

SEQ ID NO: 3918 - protein, 12 aa, Homo sapiens
  Table 3 sequence identifier: Q00610_C1528
  MOD_RES (9)..(9): May or may not be conjugated to a chemical probe
RWKQSVELCKKD

SEQ ID NO: 3919 - protein, 15 aa, Homo sapiens
  Table 3 sequence identifier: Q9BZ67_C206
  MOD_RES (13)..(13): May or may not be conjugated to a chemical probe
REKLDSFLPAHLCKR

SEQ ID NO: 3920 - protein, 12 aa, Homo sapiens
  Table 3 sequence identifier: Q5VZ89_C850
  MOD_RES (9)..(9): May or may not be conjugated to a chemical probe
KILTAALTCPKT

SEQ ID NO: 3921 - protein, 20 aa, Homo sapiens
  Table 3 sequence identifier: Q8IY18_C881
  MOD_RES (4)..(4): May or may not be conjugated to a chemical probe
RASCFTGLNPTIVQEYTKRE

SEQ ID NO: 3922 - protein, 14 aa, Homo sapiens
  Table 3 sequence identifier: Q9BXP5_C490
  MOD_RES (5)..(5): May or may not be conjugated to a chemical probe
RLRECELSPGVNRD

SEQ ID NO: 3923 - protein, 26 aa, Homo sapiens
  Table 3 sequence identifier: P29692_C217
  MOD_RES (23)..(23): May or may not be conjugated to a chemical probe
KSSILLDVKPWDDETDMAQLEACVRS

SEQ ID NO: 3924 - protein, 40 aa, Homo sapiens
  Table 3 sequence identifier: P29692_C247
  MOD_RES (6)..(6): May or may not be conjugated to a chemical probe
KLQIQCVVEDDKVGTDLLEEEITKFEEHVQSVDIAAFNKI

SEQ ID NO: 3925 - protein, 21 aa, Homo sapiens
  Table 3 sequence identifier: P62979_C121
  MOD_RES (3)..(3): May or may not be conjugated to a chemical probe
RECPSDECGAGVFMASHFDRH

SEQ ID NO: 3926 - protein, 24 aa, Homo sapiens
  Table 3 sequence identifier: O75083_C507
  MOD_RES (19)..(19): May or may not be conjugated to a chemical probe
KGPVTDVAYSHDGAFLAVCDASKV

SEQ ID NO: 3927 - protein, 19 aa, Homo sapiens
  Table 3 sequence identifier: Q13131_C185
  MOD_RES (4)..(4): May or may not be conjugated to a chemical probe
RTSCGSPNYAAPEVISGRL

SEQ ID NO: 3928 - protein, 15 aa, Homo sapiens
  Table 3 sequence identifier: P23368_C441
  MOD_RES (2)..(2): May or may not be conjugated to a chemical probe
RCLFASGSPFGPVKL

SEQ ID NO: 3929 - protein, 19 aa, Homo sapiens
  Table 3 sequence identifier: P04637_C141
  MOD_RES (3)..(3): May or may not be conjugated to a chemical probe
KTCPVQLWVDSTPPPGTRV

SEQ ID NO: 3930 - protein, 10 aa, Homo sapiens
  Table 3 sequence identifier: Q7Z6Z7_C1074
  MOD_RES (3)..(3): May or may not be conjugated to a chemical probe
KLCVGSPVRQ

SEQ ID NO: 3931 - protein, 35 aa, Homo sapiens
  Table 3 sequence identifier: Q16643_C632
  MOD_RES (18)..(18): May or may not be conjugated to a chemical probe
KAPPPVFYNKPPEIDITCWDADPVPEEEEGFEGGD

SEQ ID NO: 3932 - protein, 24 aa, Homo sapiens
  Table 3 sequence identifier: Q9UPQ0_C55
  MOD_RES (11)..(11): May or may not be conjugated to a chemical probe
RTGLENGILLCELLNAIKPGLVKK

SEQ ID NO: 3933 - protein, 18 aa, Homo sapiens
  Table 3 sequence identifier: Q9NS91_C64
  MOD_RES (8)..(8): May or may not be conjugated to a chemical probe
KTQCPTCCVTVTEPDLKN

SEQ ID NO: 3934 - protein, 21 aa, Homo sapiens
  Table 3 sequence identifier: Q7Z3D6_C124
  MOD_RES (10)..(10): May or may not be conjugated to a chemical probe
KDMVAFFLGCSFSLEEALEKA

SEQ ID NO: 3935 - protein, 13 aa, Homo sapiens
  Table 3 sequence identifier: Q53EZ4_C236
  MOD_RES (2)..(2): May or may not be conjugated to a chemical probe
KCYNDLLASAKKD

SEQ ID NO: 3936 - protein, 26 aa, Homo sapiens
  Table 3 sequence identifier: P62826_C85
  MOD_RES (15)..(15): May or may not be conjugated to a chemical probe
KFGGLRDGYYIQAQCAIIMFDVTSRV

SEQ ID NO: 3937 - protein, 11 aa, Homo sapiens
  Table 3 sequence identifier: P18583_C2070
  MOD_RES (8)..(8): May or may not be conjugated to a chemical probe
KANAAAMCAKA

SEQ ID NO: 3938 - protein, 12 aa, Homo sapiens
  Table 3 sequence identifier: Q92616_C932
  MOD_RES (7)..(7): May or may not be conjugated to a chemical probe
RLLKPECVLDKS

SEQ ID NO: 3939 - protein, 18 aa, Homo sapiens
  Table 3 sequence identifier: P22087_C99
  MOD_RES (16)..(16): May or may not be conjugated to a chemical probe
KNVMVEPHRHEGVFICRG

SEQ ID NO: 3940 - protein, 13 aa, Homo sapiens
  Table 3 sequence identifier: Q96I24_C460
  MOD_RES (5)..(5): May or may not be conjugated to a chemical probe
RSSGCFPNMAAKV

SEQ ID NO: 3941 - protein, 9 aa, Homo sapiens
  Table 3 sequence identifier: Q14657_C113
  MOD_RES (7)..(7): May or may not be conjugated to a chemical probe
RWKAEDCRL

SEQ ID NO: 3942 - protein, 29 aa, Homo sapiens
  Table 3 sequence identifier: P49327_C2091
  MOD_RES (5)..(5): May or may not be conjugated to a chemical probe
RMASCLEVLDLFLNQPHMVLSSFVLAEKA

SEQ ID NO: 3943 - protein, 24 aa, Homo sapiens
  Table 3 sequence identifier: P49327_C2468
  MOD_RES (20)..(20): May or may not be conjugated to a chemical probe
KTGGAYGEDLGADYNLSQVCDGKV

SEQ ID NO: 3944 - protein, 14 aa, Homo sapiens
  Table 3 sequence identifier: Q9UDR5_C534
  MOD_RES (12)..(12): May or may not be conjugated to a chemical probe
KYNINPVSMDICKQ

SEQ ID NO: 3945 - protein, 10 aa, Homo sapiens
  Table 3 sequence identifier: Q15746_C83
  MOD_RES (6)..(6): May or may not be conjugated to a chemical probe
RFLLDCGIRG

SEQ ID NO: 3946 - protein, 22 aa, Homo sapiens
  Table 3 sequence identifier: O14929_C120
  MOD_RES (9)..(9): May or may not be conjugated to a chemical probe
RQIIPPGFCTNTNDFLSLLEKE

SEQ ID NO: 3947 - protein, 17 aa, Homo sapiens
  Table 3 sequence identifier: Q9NS87_C862
  MOD_RES (3)..(3): May or may not be conjugated to a chemical probe
KACLQDSYDNLQEIMKF

SEQ ID NO: 3948 - protein, 25 aa, Homo sapiens
  Table 3 sequence identifier: Q8TBC4_C139
  MOD_RES (16)..(16): May or may not be conjugated to a chemical probe
KAEVAAEFLNDRVPNCNVVPHFNKI

SEQ ID NO: 3949 - protein, 23 aa, Homo sapiens
  Table 3 sequence identifier: Q13596_C318
  MOD_RES (18)..(18): May or may not be conjugated to a chemical probe
KMNESDIWFEEKLQEVECEEQRL

SEQ ID NO: 3950 - protein, 34 aa, Homo sapiens
  Table 3 sequence identifier: P55160_C780
  MOD_RES (14)..(14): May or may not be conjugated to a chemical probe
RNALLQQTQPLDSCGEQTITTLYTNWYLESLLRQ

SEQ ID NO: 3951 - protein, 17 aa, Homo sapiens
  Table 3 sequence identifier: P31150_C202
  MOD_RES (10)..(10): May or may not be conjugated to a chemical probe
RTDDYLDQPCLETVNRI

SEQ ID NO: 3952 - protein, 25 aa, Homo sapiens
  Table 3 sequence identifier: Q96BN8_C47
  MOD_RES (14)..(14): May or may not be conjugated to a chemical probe
KAAASGQPRPEMQCPAEHEEDMYRA

SEQ ID NO: 3953 - protein, 43 aa, Homo sapiens
  Table 3 sequence identifier: Q12888_C1703
  MOD_RES (19)..(19): May or may not be conjugated to a chemical probe
KSATVKPGAVGAGEFVSPCESGDNTGEPSALEEQRGPLPLNKT

SEQ ID NO: 3954 - protein, 22 aa, Homo sapiens
  Table 3 sequence identifier: Q9NRY4_C814
  MOD_RES (5)..(5): May or may not be conjugated to a chemical probe
KSSHCGSNNSVLLELPIGLHKK

SEQ ID NO: 3955 - protein, 15 aa, Homo sapiens
  Table 3 sequence identifier: Q9BV68_C15
  MOD_RES (6)..(6): May or may not be conjugated to a chemical probe
RYFCHCCSVEIVPRL

SEQ ID NO: 3956 - protein, 12 aa, Homo sapiens
  Table 3 sequence identifier: Q92974_C715
  MOD_RES (10)..(10): May or may not be conjugated to a chemical probe
RTFNGSIELCRA

SEQ ID NO: 3957 - protein, 9 aa, Homo sapiens
  Table 3 sequence identifier: Q9HAU4_C716
  MOD_RES (5)..(5): May or may not be conjugated to a chemical probe
RAHTCFNRL

SEQ ID NO: 3958 - protein, 29 aa, Homo sapiens
  Table 3 sequence identifier: P24928_C1470
  MOD_RES (19)..(19): May or may not be conjugated to a chemical probe
KGVSENIMLGQLAPAGTGCFDLLLDAEKC

SEQ ID NO: 3959 - protein, 22 aa, Homo sapiens
  Table 3 sequence identifier: P07858_C108
  MOD_RES (9)..(9): May or may not be conjugated to a chemical probe
RDQGSCGSCWAFGAVEAISDRI

SEQ ID NO: 3960 - protein, 19 aa, Homo sapiens
  Table 3 sequence identifier: O75190_C275
  MOD_RES (6)..(6): May or may not be conjugated to a chemical probe
RHAPHCLSEEEGEQDRPRA

SEQ ID NO: 3961 - protein, 10 aa, Homo sapiens
  Table 3 sequence identifier: Q9Y6X8_C11
  MOD_RES (6)..(6): May or may not be conjugated to a chemical probe
KSTTPCMVRT

SEQ ID NO: 3962 - protein, 14 aa, Homo sapiens
  Table 3 sequence identifier: P62263_C85
  MOD_RES (2)..(2): May or may not be conjugated to a chemical probe
RCKELGITALHIKL

SEQ ID NO: 3963 - protein, 12 aa, Homo sapiens
  Table 3 sequence identifier: P31146_C195
  MOD_RES (10)..(10): May or may not be conjugated to a chemical probe
RDGGLICTSCRD

SEQ ID NO: 3964 - protein, 12 aa, Homo sapiens
  Table 3 sequence identifier: Q9H2M9_C1336
  MOD_RES (7)..(7): May or may not be conjugated to a chemical probe
RLPPTLCTWLKA

SEQ ID NO: 3965 - protein, 13 aa, Homo sapiens
  Table 3 sequence identifier: O60825_C105
  MOD_RES (3)..(3): May or may not be conjugated to a chemical probe
KQCALVALEDVKA

SEQ ID NO: 3966 - protein, 12 aa, Homo sapiens
  Table 3 sequence identifier: Q9NTJ3_C271
  MOD_RES (10)..(10): May or may not be conjugated to a chemical probe
RLNEPIKVLCRR

SEQ ID NO: 3967 - protein, 34 aa, Homo sapiens
  Table 3 sequence identifier: Q00577_C292
  MOD_RES (4)..(4): May or may not be conjugated to a chemical probe
RAACEQLHQQQQQQQEETAAATLLLQGEEEGEED

SEQ ID NO: 3968 - protein, 13 aa, Homo sapiens
  Table 3 sequence identifier: Q5VT52_C903
  MOD_RES (10)..(10): May or may not be conjugated to a chemical probe
RALLDSSENCDRL

SEQ ID NO: 3969 - protein, 32 aa, Homo sapiens
  Table 3 sequence identifier: Q9UKV3_C733
  MOD_RES (3)..(3): May or may not be conjugated to a chemical probe
KKCEAEEAEPPAATQPQTSETQTSHLPESERI

SEQ ID NO: 3970 - protein, 18 aa, Homo sapiens
  Table 3 sequence identifier: Q92552_C49
  MOD_RES (7)..(7): May or may not be conjugated to a chemical probe
REKEHYCLADLASLMDKT

SEQ ID NO: 3971 - protein, 25 aa, Homo sapiens
  Table 3 sequence identifier: Q96MG7_C283
  MOD_RES (15)..(15): May or may not be conjugated to a chemical probe
KVHNQDPKDWPAQYCEALADEENRA

SEQ ID NO: 3972 - protein, 20 aa, Homo sapiens
  Table 3 sequence identifier: Q7L5D6_C205
  MOD_RES (17)..(17): May or may not be conjugated to a chemical probe
RSEVDMFVAQAVLQFLCLKN

SEQ ID NO: 3973 - protein, 10 aa, Homo sapiens
  Table 3 sequence identifier: Q8N556_C471
  MOD_RES (5)..(5): May or may not be conjugated to a chemical probe
KQTFCFMNRR

SEQ ID NO: 3974 - protein, 38 aa, Homo sapiens
  Table 3 sequence identifier: Q8N556_C506
  MOD_RES (31)..(31): May or may not be conjugated to a chemical probe
RVISANPYLGGTSNGYAHPSGTALHYDDVPCINGSLKG

SEQ ID NO: 3975 - protein, 12 aa, Homo sapiens
  Table 3 sequence identifier: P62987_C115
  MOD_RES (2)..(2): May or may not be conjugated to a chemical probe
KCGHTNNLRPKK

SEQ ID NO: 3976 - protein, 28 aa, Homo sapiens
  Table 3 sequence identifier: Q96HE7_C35
  MOD_RES (2)..(2): May or may not be conjugated to a chemical probe
RCFCQVSGYLDDCTCDVETIDRFNNYRL

SEQ ID NO: 3977 - protein, 9 aa, Homo sapiens
  Table 3 sequence identifier: Q6IBS0_C275
  MOD_RES (7)..(7): May or may not be conjugated to a chemical probe
RMLYSSCKS

SEQ ID NO: 3978 - protein, 28 aa, Homo sapiens
  Table 3 sequence identifier: Q04724_C89
  MOD_RES (6)..(6): May or may not be conjugated to a chemical probe
RLNTICAQVIPFLSQEHQQQVAQAVERA

SEQ ID NO: 3979 - protein, 17 aa, Homo sapiens
  Table 3 sequence identifier: Q9H3U1_C650
  MOD_RES (13)..(13): May or may not be conjugated to a chemical probe
KLLAAGVVSAMVCMVKT

SEQ ID NO: 3980 - protein, 24 aa, Homo sapiens
  Table 3 sequence identifier: O43374_C797
  MOD_RES (18)..(18): May or may not be conjugated to a chemical probe
REAHSSSPAGSPPSEPNCLLELQT

SEQ ID NO: 3981 - protein, 35 aa, Homo sapiens
  Table 3 sequence identifier: Q9NUQ8_C628
  MOD_RES (11)..(11): May or may not be conjugated to a chemical probe
RVAFAQMTMPCPNFYILDEPTNHLDMETIEALGRA

SEQ ID NO: 3982 - protein, 12 aa, Homo sapiens
  Table 3 sequence identifier: Q9UJF2_C443
  MOD_RES (7)..(7): May or may not be conjugated to a chemical probe
KIINSYCVFPRE

SEQ ID NO: 3983 - protein, 14 aa, Homo sapiens
  Table 3 sequence identifier: P61160_C11
  MOD_RES (5)..(5): May or may not be conjugated to a chemical probe
KVVVCDNGTGFVKC

SEQ ID NO: 3984 - protein, 13 aa, Homo sapiens
  Table 3 sequence identifier: Q7Z6M1_C115
  MOD_RES (3)..(3): May or may not be conjugated to a chemical probe
RNCLQVLNPETRT

SEQ ID NO: 3985 - protein, 22 aa, Homo sapiens
  Table 3 sequence identifier: Q13418_C422
  MOD_RES (20)..(20): May or may not be conjugated to a chemical probe
KVALEGLRPTIPPGISPHVCKL

SEQ ID NO: 3986 - protein, 13 aa, Homo sapiens
  Table 3 sequence identifier: P30153_C317
  MOD_RES (11)..(11): May or may not be conjugated to a chemical probe
KEFCENLSADCRE

SEQ ID NO: 3987 - protein, 9 aa, Homo sapiens
  Table 3 sequence identifier: P62273_C39
  MOD_RES (7)..(7): May or may not be conjugated to a chemical probe
KYGLNMCRQ

SEQ ID NO: 3988 - protein, 28 aa, Homo sapiens
  Table 3 sequence identifier: P61218_C76
  MOD_RES (8)..(8): May or may not be conjugated to a chemical probe
RALQIAMCAPVMVELEGETDPLLIAMKE

SEQ ID NO: 3989 - protein, 30 aa, Homo sapiens
  Table 3 sequence identifier: P58546_C83
  MOD_RES (27)..(27): May or may not be conjugated to a chemical probe
KGADINAPDKHHITPLLSAVYEGHVSCVKL

SEQ ID NO: 3990 - protein, 25 aa, Homo sapiens
  Table 3 sequence identifier: Q92888_C815
  MOD_RES (10)..(10): May or may not be conjugated to a chemical probe
RILSDLLPFCRPGPEGQLAATALRK

SEQ ID NO: 3991 - protein, 15 aa, Homo sapiens
  Table 3 sequence identifier: Q9BZX2_C241
  MOD_RES (6)..(6): May or may not be conjugated to a chemical probe
RQTNGCLNGYTPSRK

SEQ ID NO: 3992 - protein, 31 aa, Homo sapiens
  Table 3 sequence identifier: O43815_C316
  MOD_RES (15)..(15): May or may not be conjugated to a chemical probe
RSAGDGTDWEKEDQCLMPEAWNVDQGVITKL

SEQ ID NO: 3993 - protein, 29 aa, Homo sapiens
  Table 3 sequence identifier: O94925_C463
  MOD_RES (10)..(10): May or may not be conjugated to a chemical probe
RNTLSLMHSCGMYDFSGQFAFHVGLPAKS

SEQ ID NO: 3994 - protein, 13 aa, Homo sapiens
  Table 3 sequence identifier: P42224_C155
  MOD_RES (6)..(6): May or may not be conjugated to a chemical probe
KDKVMCIEHEIKS

SEQ ID NO: 3995 - protein, 15 aa, Homo sapiens
  Table 3 sequence identifier: P30837_C169
  MOD_RES (11)..(11): May or may not be conjugated to a chemical probe
KTIPMDGQHFCFTRH

SEQ ID NO: 3996 - protein, 31 aa, Homo sapiens
  Table 3 sequence identifier: P62140_C139
  MOD_RES (28)..(28): May or may not be conjugated to a chemical probe
KYPENFFLLRGNHECASINRIYGFYDECKRR

SEQ ID NO: 3997 - protein, 15 aa, Homo sapiens
  Table 3 sequence identifier: Q6XQN6_C533
  MOD_RES (10)..(10): May or may not be conjugated to a chemical probe
RLQALVNSLCAGQSP

SEQ ID NO: 3998 - protein, 26 aa, Homo sapiens
  Table 3 sequence identifier: Q96DM3_C333
  MOD_RES (24)..(24): May or may not be conjugated to a chemical probe
RSIQPYQIPITGPAAVTSQSPVPCKL

SEQ ID NO: 3999 - protein, 19 aa, Homo sapiens
  Table 3 sequence identifier: P33764_C53
  MOD_RES (14)..(14): May or may not be conjugated to a chemical probe
KELATWTPTEFRECDYNKF

SEQ ID NO: 4000 - protein, 41 aa, Homo sapiens
  Table 3 sequence identifier: Q96F86_C91
  MOD_RES (29)..(29): May or may not be conjugated to a chemical probe
KILEIPGPGDNQHFGDLHQTELGPSGAGCQVGINQNGTGKF

SEQ ID NO: 4001 - protein, 43 aa, Homo sapiens
  Table 3 sequence identifier: O00221_C187
  MOD_RES (22)..(22): May or may not be conjugated to a chemical probe
RSLPESTSAPASGPSDGSPQPCTHPPGPVKEPQEKEDADGERA

SEQ ID NO: 4002 - protein, 12 aa, Homo sapiens
  Table 3 sequence identifier: Q9ULC4_C144
  MOD_RES (6)..(6): May or may not be conjugated to a chemical probe
KQHALCVGVMKM

SEQ ID NO: 4003 - protein, 18 aa, Homo sapiens
  Table 3 sequence identifier: O60841_C635
  MOD_RES (8)..(8): May or may not be conjugated to a chemical probe
KLRAPIICVLGHVDTGKT

SEQ ID NO: 4004 - protein, 13 aa, Homo sapiens
  Table 3 sequence identifier: Q5TFE4_C179
  MOD_RES (4)..(4): May or may not be conjugated to a chemical probe
KENCGIYFPEIKR

SEQ ID NO: 4005 - protein, 12 aa, Homo sapiens
  Table 3 sequence identifier: Q9UNM6_C114
  MOD_RES (10)..(10): May or may not be conjugated to a chemical probe
KSSDEAVILCKT

SEQ ID NO: 4006 - protein, 45 aa, Homo sapiens
  Table 3 sequence identifier: O43847_C1109
  MOD_RES (19)..(19): May or may not be conjugated to a chemical probe
KYELEEDGTPSSEDSNSSCEVMQLTYLPTSPLLADCIIPITDIRA

SEQ ID NO: 4007 - protein, 18 aa, Homo sapiens
  Table 3 sequence identifier: Q9HAV4_C1157
  MOD_RES (6)..(6): May or may not be conjugated to a chemical probe
RLIAGCIGKPLGEQFRKE

SEQ ID NO: 4008 - protein, 18 aa, Homo sapiens
  Table 3 sequence identifier: O43172_C441
  MOD_RES (2)..(2): May or may not be conjugated to a chemical probe
RCVYTIPAHQNLVTGVKF

SEQ ID NO: 4009 - protein, 11 aa, Homo sapiens
  Table 3 sequence identifier: Q8IXW5_C105
  MOD_RES (8)..(8): May or may not be conjugated to a chemical probe
KLCGYPLCQKK

SEQ ID NO: 4010 - protein, 10 aa, Homo sapiens
  Table 3 sequence identifier: Q6QNY0_C180
  MOD_RES (8)..(8): May or may not be conjugated to a chemical probe
RLDIVAGCRL

SEQ ID NO: 4011 - protein, 35 aa, Homo sapiens
  Table 3 sequence identifier: Q14697_C423
  MOD_RES (20)..(20): May or may not be conjugated to a chemical probe
RDEADVLEVDQGFDDHNLPCDVIWLDIEHADGKRY

SEQ ID NO: 4012 - protein, 40 aa, Homo sapiens
  Table 3 sequence identifier: Q27J81_C394
  MOD_RES (26)..(26): May or may not be conjugated to a chemical probe
RGSSPQNTTTPKPSVEGQQPAAAAACEPVDHAQSESILKV

SEQ ID NO: 4013 - protein, 38 aa, Homo sapiens
  Table 3 sequence identifier: P60900_C137
  MOD_RES (21)..(21): May or may not be conjugated to a chemical probe
RIADISQVYTQNAEMRPLGCCMILIGIDEEQGPQVYKC

SEQ ID NO: 4014 - protein, 28 aa, Homo sapiens
  Table 3 sequence identifier: P55786_C66
  MOD_RES (14)..(14): May or may not be conjugated to a chemical probe
RLPADVSPINYSLCLKPDLLDFTFEGKL

SEQ ID NO: 4015 - protein, 25 aa, Homo sapiens
  Table 3 sequence identifier: P62879_C317
  MOD_RES (4)..(4): May or may not be conjugated to a chemical probe
RVSCLGVTDDGMAVATGSWDSFLKI

SEQ ID NO: 4016 - protein, 26 aa, Homo sapiens
  Table 3 sequence identifier: Q9Y692_C274
  MOD_RES (14)..(14): May or may not be conjugated to a chemical probe
KGIADVGLMEEVVCNIQKEIEELLRG

SEQ ID NO: 4017 - protein, 32 aa, Homo sapiens
  Table 3 sequence identifier: O00567_C52
  MOD_RES (6)..(6): May or may not be conjugated to a chemical probe
RLVAFCPFASSQVALENANAVSEGVVHEDLRL

SEQ ID NO: 4018 - protein, 16 aa, Homo sapiens
  Table 3 sequence identifier: Q9C0C2_C1296
  MOD_RES (9)..(9): May or may not be conjugated to a chemical probe
RNMAPGAVCSPGESKE

SEQ ID NO: 4019 - protein, 15 aa, Homo sapiens
  Table 3 sequence identifier: Q15008_C58
  MOD_RES (13)..(13): May or may not be conjugated to a chemical probe
RDNNMAPYYEALCKS

SEQ ID NO: 4020 - protein, 20 aa, Homo sapiens
  Table 3 sequence identifier: O75533_C677
  MOD_RES (12)..(12): May or may not be conjugated to a chemical probe
KIVQQIAILMGCAILPHLRS

SEQ ID NO: 4021 - protein, 10 aa, Homo sapiens
  Table 3 sequence identifier: E7EVK2_C23
  MOD_RES (7)..(7): May or may not be conjugated to a chemical probe
RENFPLCGRD

SEQ ID NO: 4022 - protein, 11 aa, Homo sapiens
  Table 3 sequence identifier: O95336_C78
  MOD_RES (7)..(7): May or may not be conjugated to a chemical probe
RWTLGFCDERL

SEQ ID NO: 4023 - protein, 17 aa, Homo sapiens
  Table 3 sequence identifier: Q9C0B1_C326
  MOD_RES (5)..(5): May or may not be conjugated to a chemical probe
RVAECSTGTLDYILQRC

SEQ ID NO: 4024 - protein, 23 aa, Homo sapiens
  Table 3 sequence identifier: Q8TEU7_C1368
  MOD_RES (7)..(7): May or may not be conjugated to a chemical probe
RGSWTSCSSSSHDNFQSLPNPKS

SEQ ID NO: 4025 - protein, 12 aa, Homo sapiens
  Table 3 sequence identifier: P35568_C923
  MOD_RES (2)..(2): May or may not be conjugated to a chemical probe
RCPSQLQPAPRE

SEQ ID NO: 4026 - protein, 19 aa, Homo sapiens
  Table 3 sequence identifier: P04049_C637
  MOD_RES (11)..(11): May or may not be conjugated to a chemical probe
RAAHTEDINACTLTTSPRL

SEQ ID NO: 4027 - protein, 29 aa, Homo sapiens
  Table 3 sequence identifier: P60660_C138
  MOD_RES (20)..(20): May or may not be conjugated to a chemical probe
KMTEEEVEMLVAGHEDSNGCINYEAFVRH

SEQ ID NO: 4028 - protein, 22 aa, Homo sapiens
  Table 3 sequence identifier: Q8NDH3_C189
  MOD_RES (7)..(7): May or may not be conjugated to a chemical probe
RIVDTPCNEMNTDTFLEEINKV

SEQ ID NO: 4029 - protein, 17 aa, Homo sapiens
  Table 3 sequence identifier: P25786_C182
  MOD_RES (9)..(9): May or may not be conjugated to a chemical probe
RHMSEFMECNLNELVKH

SEQ ID NO: 4030 - protein, 34 aa, Homo sapiens
  Table 3 sequence identifier: Q7L591_C385
  MOD_RES (32)..(32): May or may not be conjugated to a chemical probe
KMHLAEPGPQSLPLLLGPEPNDLASGLYASVCKR

SEQ ID NO: 4031 - protein, 16 aa, Homo sapiens
  Table 3 sequence identifier: Q9UJM3_C146
  MOD_RES (13)..(13): May or may not be conjugated to a chemical probe
KNSPSLFPCAPLCERG

SEQ ID NO: 4032 - protein, 25 aa, Homo sapiens
  Table 3 sequence identifier: O00159_C679
  MOD_RES (4)..(4): May or may not be conjugated to a chemical probe
KSLCPETWPTWAGRPQDGVAVLVRH

SEQ ID NO: 4033 - protein, 10 aa, Homo sapiens
  Table 3 sequence identifier: P55060_C61
  MOD_RES (3)..(3): May or may not be conjugated to a chemical probe
KVCASVTFKN

SEQ ID NO: 4034 - protein, 17 aa, Homo sapiens
  Table 3 sequence identifier: P14868_C130
  MOD_RES (5)..(5): May or may not be conjugated to a chemical probe
KIGSCTQQDVELHVQKI

SEQ ID NO: 4035 - protein, 12 aa, Homo sapiens
  Table 3 sequence identifier: P14868_C259
  MOD_RES (6)..(6): May or may not be conjugated to a chemical probe
KQMCICADFEKV

SEQ ID NO: 4036 - protein, 30 aa, Homo sapiens
  Table 3 sequence identifier: P45954_C261
  MOD_RES (6)..(6): May or may not be conjugated to a chemical probe
RASSTCPLTFENVKVPEANILGQIGHGYKY

SEQ ID NO: 4037 - protein, 22 aa, Homo sapiens
  Table 3 sequence identifier: Q01664_C29
  MOD_RES (8)..(8): May or may not be conjugated to a chemical probe
KEVIGGLCSLANIPLTPETQRD

SEQ ID NO: 4038 - protein, 26 aa, Homo sapiens
  Table 3 sequence identifier: P08138_C381
  MOD_RES (22)..(22): May or may not be conjugated to a chemical probe
RHLAGELGYQPEHIDSFTHEACPVRA

SEQ ID NO: 4039 - protein, 9 aa, Homo sapiens
  Table 3 sequence identifier: O60671_C239
  MOD_RES (7)..(7): May or may not be conjugated to a chemical probe
KALVLSCKV

SEQ ID NO: 4040 - protein, 30 aa, Homo sapiens
  Table 3 sequence identifier: P46379_C856
  MOD_RES (21)..(21): May or may not be conjugated to a chemical probe
RTNLEFLQEQFNSIAAHVLHCTDSGFGARL

SEQ ID NO: 4041 - protein, 20 aa, Homo sapiens
  Table 3 sequence identifier: P26022_C103
  MOD_RES (10)..(10): May or may not be conjugated to a chemical probe
RLAESLARPCAPGAPAEARL

SEQ ID NO: 4042 - protein, 18 aa, Homo sapiens
  Table 3 sequence identifier: Q9BYX2_C651
  MOD_RES (10)..(10): May or may not be conjugated to a chemical probe
RVQHLHTPGCYQELLSRG

SEQ ID NO: 4043 - protein, 22 aa, Homo sapiens
  Table 3 sequence identifier: P23610_C76
  MOD_RES (2)..(2): May or may not be conjugated to a chemical probe
RCQQALFHGPGEALALTEAARL

SEQ ID NO: 4044 - protein, 10 aa, Homo sapiens
  Table 3 sequence identifier: Q9NZE8_C119
  MOD_RES (4)..(4): May or may not be conjugated to a chemical probe
RLHCGLWVRR

SEQ ID NO: 4045 - protein, 26 aa, Homo sapiens
  Table 3 sequence identifier: Q9UJZ1_C167
  MOD_RES (18)..(18): May or may not be conjugated to a chemical probe
RESLNASIVDAINQAADCWGIRCLRY

SEQ ID NO: 4046 - protein, 36 aa, Homo sapiens
  Table 3 sequence identifier: P31937_C251
  MOD_RES (2)..(2): May or may not be conjugated to a chemical probe
RCWSSDTYNPVPGVMDGVPSANNYQGGFGTTLMAKD

SEQ ID NO: 4047 - protein, 13 aa, Homo sapiens
  Table 3 sequence identifier: Q9NR56_C34
  MOD_RES (11)..(11): May or may not be conjugated to a chemical probe
RGTCSRPDTECKF

SEQ ID NO: 4048 - protein, 27 aa, Homo sapiens
  Table 3 sequence identifier: Q9P0V9_C100
  MOD_RES (22)..(22): May or may not be conjugated to a chemical probe
KSTLIDTLFNTNFEDYESSHFCPNVKL

SEQ ID NO: 4049 - protein, 21 aa, Homo sapiens
  Table 3 sequence identifier: Q96AT9_C23
  MOD_RES (18)..(18): May or may not be conjugated to a chemical probe
KIGPSILNSDLANLGAECLRM

SEQ ID NO: 4050 - protein, 12 aa, Homo sapiens
  Table 3 sequence identifier: Q08378_C1431
  MOD_RES (6)..(6): May or may not be conjugated to a chemical probe
KNLNSCLQQLKQ

SEQ ID NO: 4051 - protein, 15 aa, Homo sapiens
  Table 3 sequence identifier: Q9Y4X5_C161
  MOD_RES (6)..(6): May or may not be conjugated to a chemical probe
KLFAECHVINPSKKS

SEQ ID NO: 4052 - protein, 15 aa, Homo sapiens
  Table 3 sequence identifier: P09417_C161
  MOD_RES (8)..(8): May or may not be conjugated to a chemical probe
KGAVHQLCQSLAGKN

SEQ ID NO: 4053 - protein, 12 aa, Homo sapiens
  Table 3 sequence identifier: Q7L014_C377
  MOD_RES (6)..(6): May or may not be conjugated to a chemical probe
KSWVQCGISMKI

SEQ ID NO: 4054 - protein, 13 aa, Homo sapiens
  Table 3 sequence identifier: Q7L014_C501
  MOD_RES (8)..(8): May or may not be conjugated to a chemical probe
RGAEIIVCTPGRM

SEQ ID NO: 4055 - protein, 16 aa, Homo sapiens
  Table 3 sequence identifier: Q92917_C137
  MOD_RES (3)..(3): May or may not be conjugated to a chemical probe
KGCTPSGEGADSEPRA

SEQ ID NO: 4056 - protein, 26 aa, Homo sapiens
  Table 3 sequence identifier: P28340_C1058
  MOD_RES (9)..(9): May or may not be conjugated to a chemical probe
RFSRLWTQCQRCQGSLHEDVICTSRD

SEQ ID NO: 4057 - protein, 18 aa, Homo sapiens
  Table 3 sequence identifier: P53350_C212
  MOD_RES (4)..(4): May or may not be conjugated to a chemical probe
KTLCGTPNYIAPEVLSKK

SEQ ID NO: 4058 - protein, 12 aa, Homo sapiens
  Table 3 sequence identifier: Q86VP6_C942
  MOD_RES (5)..(5): May or may not be conjugated to a chemical probe
KHCECAEEGTRN

SEQ ID NO: 4059 - protein, 17 aa, Homo sapiens
  Table 3 sequence identifier: P35237_C350
  MOD_RES (3)..(3): May or may not be conjugated to a chemical probe
RFCADHPFLFFIQHSKT

SEQ ID NO: 4060 - protein, 16 aa, Homo sapiens
  Table 3 sequence identifier: P67775_C266
  MOD_RES (13)..(13): May or may not be conjugated to a chemical probe
RNVVTIFSAPNYCYRC

SEQ ID NO: 4061 - protein, 9 aa, Homo sapiens
  Table 3 sequence identifier: Q14152_C478
  MOD_RES (3)..(3): May or may not be conjugated to a chemical probe
RHCDLQVRI

SEQ ID NO: 4062 - protein, 27 aa, Homo sapiens
  Table 3 sequence identifier: P19338_C543
  MOD_RES (23)..(23): May or may not be conjugated to a chemical probe
KSKGYAFIEFASFEDAKEALNSCNKRE

SEQ ID NO: 4063 - protein, 40 aa, Homo sapiens
  Table 3 sequence identifier: Q16576_C277
  MOD_RES (21)..(21): May or may not be conjugated to a chemical probe
RSNTTSKPSHLVDAHTAEVNCLSFNPYSEFILATGSADKT

SEQ ID NO: 4064 - protein, 10 aa, Homo sapiens
  Table 3 sequence identifier: Q5UIP0_C2274
  MOD_RES (2)..(2): May or may not be conjugated to a chemical probe
KCLISEMAKE

SEQ ID NO: 4065 - protein, 37 aa, Homo sapiens
  Table 3 sequence identifier: O60566_C578
  MOD_RES (17)..(17): May or may not be conjugated to a chemical probe
KTSESITSNEDVSPDVCDEFTGIEPLSEDAIITGFRN

SEQ ID NO: 4066 - protein, 23 aa, Homo sapiens
  Table 3 sequence identifier: O60566_C723
  MOD_RES (18)..(18): May or may not be conjugated to a chemical probe
KLELTNETSENPTQSPWCSQYRR

SEQ ID NO: 4067 - protein, 10 aa, Homo sapiens
  Table 3 sequence identifier: Q9UBU9_C252
  MOD_RES (3)..(3): May or may not be conjugated to a chemical probe
RSCMAATLRI

SEQ ID NO: 4068 - protein, 13 aa, Homo sapiens
  Table 3 sequence identifier: P41134_C34
  MOD_RES (2)..(2): May or may not be conjugated to a chemical probe
RCLSEQSVAISRC

SEQ ID NO: 4069 - protein, 14 aa, Homo sapiens
  Table 3 sequence identifier: Q03001_C5610
  MOD_RES (10)..(10): May or may not be conjugated to a chemical probe
RSELLQQALCNAKI

SEQ ID NO: 4070 - protein, 12 aa, Homo sapiens
  Table 3 sequence identifier: P49720_C19
  MOD_RES (3)..(3): May or may not be conjugated to a chemical probe
KNCVAIAADRRF

SEQ ID NO: 4071 - protein, 10 aa, Homo sapiens
  Table 3 sequence identifier: Q15054_C129
  MOD_RES (7)..(7): May or may not be conjugated to a chemical probe
KSNLQNCSKF

SEQ ID NO: 4072 - protein, 13 aa, Homo sapiens
  Table 3 sequence identifier: Q9Y223_C183
  MOD_RES (7)..(7): May or may not be conjugated to a chemical probe
RILLAGCPSYDKL

SEQ ID NO: 4073 - protein, 13 aa, Homo sapiens
  Table 3 sequence identifier: P31323_C373
  MOD_RES (2)..(2): May or may not be conjugated to a chemical probe
KCLAMDVQAFERL

SEQ ID NO: 4074 - protein, 11 aa, Homo sapiens
  Table 3 sequence identifier: Q08257_C145
  MOD_RES (8)..(8): May or may not be conjugated to a chemical probe
RALIHSACVKA

SEQ ID NO: 4075 - protein, 17 aa, Homo sapiens
  Table 3 sequence identifier: P18031_C344
  MOD_RES (10)..(10): May or may not be conjugated to a chemical probe
KEETQEDKDCPIKEEKG

SEQ ID NO: 4076 - protein, 30 aa, Homo sapiens
  Table 3 sequence identifier: P04075_C240
  MOD_RES (26)..(26): May or may not be conjugated to a chemical probe
KALSDHHIYLEGTLLKPNMVTPGHACTQKF

SEQ ID NO: 4077 - protein, 14 aa, Homo sapiens
  Table 3 sequence identifier: Q8WYP5_C1261
  MOD_RES (3)..(3): May or may not be conjugated to a chemical probe
KKCAVPVETEWLKS

SEQ ID NO: 4078 - protein, 19 aa, Homo sapiens
  Table 3 sequence identifier: Q14145_C319
  MOD_RES (17)..(17): May or may not be conjugated to a chemical probe
KIFEELTLHKPTQVMPCRA

SEQ ID NO: 4079 - protein, 9 aa, Homo sapiens
  Table 3 sequence identifier: Q14141_C432
  MOD_RES (7)..(7): May or may not be conjugated to a chemical probe
KNNPWLCTE

SEQ ID NO: 4080 - protein, 15 aa, Homo sapiens
  Table 3 sequence identifier: P46821_C261
  MOD_RES (6)..(6): May or may not be conjugated to a chemical probe
KLSKPCCYIFPGGRG

SEQ ID NO: 4081 - protein, 16 aa, Homo sapiens
  Table 3 sequence identifier: O00291_C249
  MOD_RES (5)..(5): May or may not be conjugated to a chemical probe
KLHSCLPADTLQGHRD

SEQ ID NO: 4082 - protein, 8 aa, Homo sapiens
  Table 3 sequence identifier: Q96A65_C106
  MOD_RES (6)..(6): May or may not be conjugated to a chemical probe
KMLLHCKR

SEQ ID NO: 4083 - protein, 9 aa, Homo sapiens
  Table 3 sequence identifier: P34896_C389
  MOD_RES (4)..(4): May or may not be conjugated to a chemical probe
KNTCPGDRS

SEQ ID NO: 4084 - protein, 21 aa, Homo sapiens
  Table 3 sequence identifier: Q6XZF7_C327
  MOD_RES (9)..(9): May or may not be conjugated to a chemical probe
RIPETSLDCLENTLGVEEQRH

SEQ ID NO: 4085 - protein, 19 aa, Homo sapiens
  Table 3 sequence identifier: O95671_C274
  MOD_RES (16)..(16): May or may not be conjugated to a chemical probe
KAEAGEAGQATAEAECHRT

SEQ ID NO: 4086 - protein, 14 aa, Homo sapiens
  Table 3 sequence identifier: P09960_C147
  MOD_RES (6)..(6): May or may not be conjugated to a chemical probe
RAILPCQDTPSVKL

SEQ ID NO: 4087 - protein, 20 aa, Homo sapiens
  Table 3 sequence identifier: P09960_C200
  MOD_RES (6)..(6): May or may not be conjugated to a chemical probe
KVPIPCYLIALVVGALESRQ

SEQ ID NO: 4088 - protein, 22 aa, Homo sapiens
  Table 3 sequence identifier: Q86WB0_C125
  MOD_RES (10)..(10): May or may not be conjugated to a chemical probe
KCSSCQAFLCASLQPAFDFDRY

SEQ ID NO: 4089 - protein, 23 aa, Homo sapiens
  Table 3 sequence identifier: Q96EP5_C63
  MOD_RES (7)..(7): May or may not be conjugated to a chemical probe
KFKDPNCVGTVLASRPHTLDGRN

SEQ ID NO: 4090 - protein, 22 aa, Homo sapiens
  Table 3 sequence identifier: Q9Y490_C732
  MOD_RES (12)..(12): May or may not be conjugated to a chemical probe
KVVAPTISSPVCQEQLVEAGRL

SEQ ID NO: 4091 - protein, 12 aa, Homo sapiens
  Table 3 sequence identifier: Q9Y490_C1506
  MOD_RES (7)..(7): May or may not be conjugated to a chemical probe
KHTSALCNSCRL

SEQ ID NO: 4092 - protein, 25 aa, Homo sapiens
  Table 3 sequence identifier: P27708_C2161
  MOD_RES (11)..(11): May or may not be conjugated to a chemical probe
RFGSTQEYEACFGQFILTPHIMTRA

SEQ ID NO: 4093 - protein, 15 aa, Homo sapiens
  Table 3 sequence identifier: O95628_C175
  MOD_RES (5)..(5): May or may not be conjugated to a chemical probe
RAIQCVNNVVVDGRT

SEQ ID NO: 4094 - protein, 14 aa, Homo sapiens
  Table 3 sequence identifier: Q02535_C16
  MOD_RES (9)..(9): May or may not be conjugated to a chemical probe
RGCYEAVCCLSERS

SEQ ID NO: 4095 - protein, 26 aa, Homo sapiens
  Table 3 sequence identifier: P23497_C238
  MOD_RES (22)..(22): May or may not be conjugated to a chemical probe
KRKDTTSDKDDSLGSQQTNEQCAQKA

SEQ ID NO: 4096 - protein, 26 aa, Homo sapiens
  Table 3 sequence identifier: P23497_C468
  MOD_RES (20)..(20): May or may not be conjugated to a chemical probe
RFSSSDFSDLSNGEELQETCSSSLRR

SEQ ID NO: 4097 - protein, 25 aa, Homo sapiens
  Table 3 sequence identifier: Q8IV63_C191
  MOD_RES (18)..(18): May or may not be conjugated to a chemical probe
RDNQGILYEAAPTSTLTCDSGPQKQ

SEQ ID NO: 4098 - protein, 20 aa, Homo sapiens
  Table 3 sequence identifier: Q7L5Y1_C307
  MOD_RES (16)..(16): May or may not be conjugated to a chemical probe
KALVPLGIGIATGEQCHNRV

SEQ ID NO: 4099 - protein, 29 aa, Homo sapiens
  Table 3 sequence identifier: Q9UBW7_C1331
  MOD_RES (11)..(11): May or may not be conjugated to a chemical probe
RMDVFYLQPECSSSTDSPVWYTSTSLDRN

SEQ ID NO: 4100 - protein, 37 aa, Homo sapiens; identical to SEQ ID NO: 966
  Table 3 sequence identifier: O15446_C86
  MOD_RES (6)..(6): May or may not be conjugated to a chemical probe

SEQ ID NO: 4101 - protein, 9 aa, Homo sapiens
  Table 3 sequence identifier: P54136_C312
  MOD_RES (4)..(4): May or may not be conjugated to a chemical probe
KLICDVSRQ

SEQ ID NO: 4102 - protein, 27 aa, Homo sapiens
  Table 3 sequence identifier: P49748_C215
  MOD_RES (12)..(12): May or may not be conjugated to a chemical probe
KLASGETVAAFCLTEPSSGSDAASIRT

SEQ ID NO: 4103 - protein, 10 aa, Homo sapiens
  Table 3 sequence identifier: Q9BRX2_C175
  MOD_RES (4)..(4): May or may not be conjugated to a chemical probe
KGNCSQHDRA

SEQ ID NO: 4104 - protein, 16 aa, Homo sapiens
  Table 3 sequence identifier: O95544_C69
  MOD_RES (7)..(7): May or may not be conjugated to a chemical probe
RSLHGPCPVTTFGPKA

SEQ ID NO: 4105 - protein, 44 aa, Homo sapiens
  Table 3 sequence identifier: Q969W3_C159
  MOD_RES (31)..(31): May or may not be conjugated to a chemical probe
RASGPEGSLSQTMAGSSPNTPQPVPEQSALCQGLYFHINQTLRE

SEQ ID NO: 4106 - protein, 8 aa, Homo sapiens
  Table 3 sequence identifier: P62917_C195
  MOD_RES (4)..(4): May or may not be conjugated to a chemical probe
KRNCWPRV

SEQ ID NO: 4107 - protein, 8 aa, Homo sapiens
  Table 3 sequence identifier: Q00839_C335
  MOD_RES (3)..(3): May or may not be conjugated to a chemical probe
KVCFEMKV

SEQ ID NO: 4108 - protein, 20 aa, Homo sapiens
  Table 3 sequence identifier: P00568_C25
  MOD_RES (17)..(17): May or may not be conjugated to a chemical probe
KIIFVVGGPGSGKGTQCEKI

SEQ ID NO: 4109 - protein, 27 aa, Homo sapiens
  Table 3 sequence identifier: D6RAD4_C275
  MOD_RES (20)..(20): May or may not be conjugated to a chemical probe
KYFSNRPGPTPGCQLPRPNCPVETLKE

SEQ ID NO: 4110 - protein, 24 aa, Homo sapiens
  Table 3 sequence identifier: P49368_C475
  MOD_RES (7)..(7): May or may not be conjugated to a chemical probe
KHTQENCETWGVNGETGTLVDMKE

SEQ ID NO: 4111 - protein, 17 aa, Homo sapiens
  Table 3 sequence identifier: Q53S33_C59
  MOD_RES (9)..(9): May or may not be conjugated to a chemical probe
KVTDISGGCGAMYEIKI

SEQ ID NO: 4112 - protein, 35 aa, Homo sapiens
  Table 3 sequence identifier: Q96A49_C283
  MOD_RES (26)..(26): May or may not be conjugated to a chemical probe
KTQEDEEEISTSPGVSEFVSDAFDACNLNQEDLRK

SEQ ID NO: 4113 - protein, 15 aa, Homo sapiens
  Table 3 sequence identifier: Q6ZS81_C1665
  MOD_RES (7)..(7): May or may not be conjugated to a chemical probe
RFRDGLCAGSWVERS

SEQ ID NO: 4114 - protein, 13 aa, Homo sapiens
  Table 3 sequence identifier: P60981_C39
  MOD_RES (6)..(6): May or may not be conjugated to a chemical probe
KAVIFCLSADKKC

SEQ ID NO: 4115 - protein, 11 aa, Homo sapiens
  Table 3 sequence identifier: P51531_C1296
  MOD_RES (4)..(4): May or may not be conjugated to a chemical probe
RLTCEEEEEKI

SEQ ID NO: 4116 - protein, 13 aa, Homo sapiens
  Table 3 sequence identifier: Q7Z417_C234
  MOD_RES (3)..(3): May or may not be conjugated to a chemical probe
KGCENLNIVQDKI

SEQ ID NO: 4117 - protein, 17 aa, Homo sapiens
  Table 3 sequence identifier: O00410_C180
  MOD_RES (6)..(6): May or may not be conjugated to a chemical probe
RMLVQCMQDQEHPSIRT

SEQ ID NO: 4118 - protein, 17 aa, Homo sapiens
  Table 3 sequence identifier: O00410_C972
  MOD_RES (10)..(10): May or may not be conjugated to a chemical probe
KENVNATENCISAVGKI

SEQ ID NO: 4119 - protein, 12 aa, Homo sapiens
  Table 3 sequence identifier: Q9NTK5_C187
  MOD_RES (10)..(10): May or may not be conjugated to a chemical probe
KLKPEYDIMCKV

SEQ ID NO: 4120 - protein, 25 aa, Homo sapiens
  Table 3 sequence identifier: P60228_C350
  MOD_RES (5)..(5): May or may not be conjugated to a chemical probe
RIHQCISINMLADKLNMTPEEAERW

SEQ ID NO: 4121 - protein, 36 aa, Homo sapiens
  Table 3 sequence identifier: Q96CP2_C132
  MOD_RES (29)..(29): May or may not be conjugated to a chemical probe
RQDPGTDRTEDSGLAAGPPEAAGENFAPCSVAPGKS

SEQ ID NO: 4122 - protein, 31 aa, Homo sapiens
  Table 3 sequence identifier: H0YGG7_C34
  MOD_RES (11)..(11): May or may not be conjugated to a chemical probe
RHRNWYIQATCATSGDGLYEGLDWLANQLKN

SEQ ID NO: 4123 - protein, 28 aa, Homo sapiens
  Table 3 sequence identifier: Q92538_C1766
  MOD_RES (18)..(18): May or may not be conjugated to a chemical probe
RTPGHPPPPEIPSELGACDFEKPESPRA

SEQ ID NO: 4124 - protein, 13 aa, Homo sapiens
  Table 3 sequence identifier: O95081_C39
  MOD_RES (6)..(6): May or may not be conjugated to a chemical probe
RELGGCSQAGNRH

SEQ ID NO: 4125 - protein, 34 aa, Homo sapiens
  Table 3 sequence identifier: Q16531_C977
  MOD_RES (31)..(31): May or may not be conjugated to a chemical probe
RDFNPNWMSAVEILDDDNFLGAENAFNLFVCQKD

SEQ ID NO: 4126 - protein, 30 aa, Homo sapiens
  Table 3 sequence identifier: P28482_C254
  MOD_RES (24)..(24): May or may not be conjugated to a chemical probe
KHYLDQLNHILGILGSPSQEDLNCIINLKA

SEQ ID NO: 4127 - protein, 17 aa, Homo sapiens
  Table 3 sequence identifier: P36578_C208
  MOD_RES (5)..(5): May or may not be conjugated to a chemical probe
RRGPCIIYNEDNGIIKA

SEQ ID NO: 4128 - protein, 16 aa, Homo sapiens
  Table 3 sequence identifier: Q8NC26_C75
  MOD_RES (3)..(3): May or may not be conjugated to a chemical probe
RVCLTSISSQHSTLRE

SEQ ID NO: 4129 - protein, 13 aa, Homo sapiens
  Table 3 sequence identifier: Q9BQ69_C199
  MOD_RES (11)..(11): May or may not be conjugated to a chemical probe
RAAGPLLTDECRT

SEQ ID NO: 4130 - protein, 27 aa, Homo sapiens
  Table 3 sequence identifier: B2RTY4_C2032
  MOD_RES (8)..(8): May or may not be conjugated to a chemical probe
RASVCKLCKYACHKKCCLKTTAKCSKK

SEQ ID NO: 4131 - protein, 14 aa, Homo sapiens
  Table 3 sequence identifier: Q9NZL9_C17
  MOD_RES (12)..(12): May or may not be conjugated to a chemical probe
KELSIHFVPGSCRL

SEQ ID NO: 4132 - protein, 10 aa, Homo sapiens
  Table 3 sequence identifier: P30291_C19
  MOD_RES (6)..(6): May or may not be conjugated to a chemical probe
RAGAACTLRQ

SEQ ID NO: 4133 - protein, 31 aa, Homo sapiens
  Table 3 sequence identifier: Q53ET0_C675
  MOD_RES (17)..(17): May or may not be conjugated to a chemical probe
RMEPLGLEGLNMLSDPCALLPDPAVEESFRS

SEQ ID NO: 4134 - protein, 9 aa, Homo sapiens
  Table 3 sequence identifier: P02765_C219
  MOD_RES (2)..(2): May or may not be conjugated to a chemical probe
KCNLLAEKQ

SEQ ID NO: 4135 - protein, 12 aa, Homo sapiens
  Table 3 sequence identifier: Q96T60_C353
  MOD_RES (6)..(6): May or may not be conjugated to a chemical probe
RSGPLCLPESRA

SEQ ID NO: 4136 - protein, 23 aa, Homo sapiens
  Table 3 sequence identifier: P43034_C252
  MOD_RES (15)..(15): May or may not be conjugated to a chemical probe
RMVRPNQDGTLIASCSNDQTVRV

SEQ ID NO: 4137 - protein, 34 aa, Homo sapiens
  Table 3 sequence identifier: Q9P215_C39
  MOD_RES (3)..(3): May or may not be conjugated to a chemical probe
RICSEGGWVPALFDEVAIYFSDEEWEVLTEQQKA

SEQ ID NO: 4138 - protein, 37 aa, Homo sapiens
  Table 3 sequence identifier: P09001_C338
  MOD_RES (27)..(27): May or may not be conjugated to a chemical probe
KNLPFPTYFPDGDEEELPEDLYDENVCQPGAPSITFA

SEQ ID NO: 4139 - protein, 17 aa, Homo sapiens
  Table 3 sequence identifier: Q8NFC6_C2164
  MOD_RES (2)..(2): May or may not be conjugated to a chemical probe
KCAESLQPVAAAVEERA

SEQ ID NO: 4140 - protein, 16 aa, Homo sapiens
  Table 3 sequence identifier: Q13126_C136
  MOD_RES (4)..(4): May or may not be conjugated to a chemical probe
RGVCHIPMAEPFCPKT

SEQ ID NO: 4141 - protein, 27 aa, Homo sapiens
  Table 3 sequence identifier: Q9Y6I3_C205
  MOD_RES (10)..(10): May or may not be conjugated to a chemical probe
KEEADQPPSCGPEDDAQLQLALSLSRE

SEQ ID NO: 4142 - protein, 27 aa, Homo sapiens
  Table 3 sequence identifier: Q9HA47_C236
  MOD_RES (25)..(25): May or may not be conjugated to a chemical probe
RGVDNMVAINLIVQHIQDILNGDICKW

SEQ ID NO: 4143 - protein, 19 aa, Homo sapiens
  Table 3 sequence identifier: Q96KG9_C88
  MOD_RES (2)..(2): May or may not be conjugated to a chemical probe
KCLHVVTEAVTPLGIYLKA

SEQ ID NO: 4144 - protein, 19 aa, Homo sapiens
  Table 3 sequence identifier: P49419_C70
  MOD_RES (9)..(9): May or may not be conjugated to a chemical probe
RGEVITTYCPANNEPIARV

SEQ ID NO: 4145 - protein, 22 aa, Homo sapiens
  Table 3 sequence identifier: Q96RU3_C511
  MOD_RES (17)..(17): May or may not be conjugated to a chemical probe
RQSGLYDSQNPPTVNNCAQDRE

SEQ ID NO: 4146 - protein, 13 aa, Homo sapiens
  Table 3 sequence identifier: Q96RU2_C733
  MOD_RES (2)..(2): May or may not be conjugated to a chemical probe
RCLSSEHAVIVKE

SEQ ID NO: 4147 - protein, 15 aa, Homo sapiens
  Table 3 sequence identifier: Q16270_C71
  MOD_RES (7)..(7): May or may not be conjugated to a chemical probe
RGEGEPCGGGGAGRG

SEQ ID NO: 4148 - protein, 12 aa, Homo sapiens
  Table 3 sequence identifier: P50395_C302
  MOD_RES (4)..(4): May or may not be conjugated to a chemical probe
RVICILSHPIKN

SEQ ID NO: 4149 - protein, 18 aa, Homo sapiens
  Table 3 sequence identifier: P50395_C414
  MOD_RES (13)..(13): May or may not be conjugated to a chemical probe
RTYDATTHFETTCDDIKN

SEQ ID NO: 4150 - protein, 12 aa, Homo sapiens
  Table 3 sequence identifier: P40306_C17
  MOD_RES (9)..(9): May or may not be conjugated to a chemical probe
RGGFSFENCQRN

SEQ ID NO: 4151 - protein, 15 aa, Homo sapiens
  Table 3 sequence identifier: Q16181_C204
  MOD_RES (10)..(10): May or may not be conjugated to a chemical probe
KADTLTPEECQQFKK

SEQ ID NO: 4152 - protein, 17 aa, Homo sapiens
  Table 3 sequence identifier: P60891_C41
  MOD_RES (8)..(8): May or may not be conjugated to a chemical probe
KFSNQETCVEIGESVRG

SEQ ID NO: 4153 - protein, 11 aa, Homo sapiens
  Table 3 sequence identifier: Q00403_C223
  MOD_RES (7)..(7): May or may not be conjugated to a chemical probe
RFCSNLCLPKQ

SEQ ID NO: 4154 - protein, 24 aa, Homo sapiens
  Table 3 sequence identifier: O95816_C142
  MOD_RES (11)..(11): May or may not be conjugated to a chemical probe
KSHLMSLYSACSSEVPHGPVDQKF

SEQ ID NO: 4155 - protein, 20 aa, Homo sapiens
  Table 3 sequence identifier: Q00610_C926
  MOD_RES (4)..(4): May or may not be conjugated to a chemical probe
RGQCDLELINVCNENSLFKS

SEQ ID NO: 4156 - protein, 14 aa, Homo sapiens
  Table 3 sequence identifier: Q00610_C1102
  MOD_RES (2)..(2): May or may not be conjugated to a chemical probe
RCNEPAVWSQLAKA

SEQ ID NO: 4157 - protein, 16 aa, Homo sapiens
  Table 3 sequence identifier: Q12996_C176
  MOD_RES (3)..(3): May or may not be conjugated to a chemical probe
RGCVNPMINIEQLWRD

SEQ ID NO: 4158 - protein, 17 aa, Homo sapiens
  Table 3 sequence identifier: Q9BXB5_C33
  MOD_RES (11)..(11): May or may not be conjugated to a chemical probe
RATSAGSSPSCSLAGRG

SEQ ID NO: 4159 - protein, 38 aa, Homo sapiens
  Table 3 sequence identifier: P46013_C475
  MOD_RES (10)..(10): May or may not be conjugated to a chemical probe
KLGTTAGQMCSGLPGLSSVDINNFGDSINESEGIPLKR

SEQ ID NO: 4160 - protein, 20 aa, Homo sapiens
  Table 3 sequence identifier: P46013_C1251
  MOD_RES (4)..(4): May or may not be conjugated to a chemical probe
KIPCDSPQSDPVDTPTSTKQ

SEQ ID NO: 4161 - protein, 9 aa, Homo sapiens
  Table 3 sequence identifier: O94979_C704
  MOD_RES (5)..(5): May or may not be conjugated to a chemical probe
KLVACWTKA

SEQ ID NO: 4162 - protein, 21 aa, Homo sapiens
  Table 3 sequence identifier: O75083_C170
  MOD_RES (10)..(10): May or may not be conjugated to a chemical probe
RLATGSDDNCAAFFEGPPFKF

SEQ ID NO: 4163 - protein, 16 aa, Homo sapiens
  Table 3 sequence identifier: O43252_C53
  MOD_RES (3)..(3): May or may not be conjugated to a chemical probe
RGCTVWLTGLSGAGKT

SEQ ID NO: 4164 - protein, 31 aa, Homo sapiens
  Table 3 sequence identifier: Q13131_C117
  MOD_RES (29)..(29): May or may not be conjugated to a chemical probe
KLYQVISTPSDIFMVMEYVSGGELFDYICKN

SEQ ID NO: 4165 - protein, 10 aa, Homo sapiens
  Table 3 sequence identifier: P62633_C158
  MOD_RES (7)..(7): May or may not be conjugated to a chemical probe
KTSEVNCYRC

SEQ ID NO: 4166 - protein, 31 aa, Homo sapiens
  Table 3 sequence identifier: P52732_C695
  MOD_RES (23)..(23): May or may not be conjugated to a chemical probe
KELDGFLSILCNNLHELQENTICSLVESQKQ

SEQ ID NO: 4167 - protein, 24 aa, Homo sapiens
  Table 3 sequence identifier: Q8TD16_C437
  MOD_RES (22)..(22): May or may not be conjugated to a chemical probe
RDSHEDGDYYEVDINGPEILACKY

SEQ ID NO: 4168 - protein, 10 aa, Homo sapiens
  Table 3 sequence identifier: Q14008_C1768
  MOD_RES (8)..(8): May or may not be conjugated to a chemical probe
KTLLHTLCKL

SEQ ID NO: 4169 - protein, 24 aa, Homo sapiens
  Table 3 sequence identifier: P60604_C89
  MOD_RES (3)..(3): May or may not be conjugated to a chemical probe
RVCISILHAPGDDPMGYESSAERW

SEQ ID NO: 4170 - protein, 34 aa, Homo sapiens
  Table 3 sequence identifier: Q9UHY1_C478
  MOD_RES (5)..(5): May or may not be conjugated to a chemical probe
RHLSCDLMPNENIPELAAELVQLGFISEADQSRL

SEQ ID NO: 4171 - protein, 33 aa, Homo sapiens
  Table 3 sequence identifier: Q9BPX3_C317
  MOD_RES (31)..(31): May or may not be conjugated to a chemical probe
RLDVENSSEVAVSVLNALFSITPLSELVGLCKN

SEQ ID NO: 4172 - protein, 17 aa, Homo sapiens
  Table 3 sequence identifier: Q9NZJ9_C131
  MOD_RES (5)..(5): May or may not be conjugated to a chemical probe
KVLQCHKPVHAEYLEKL

SEQ ID NO: 4173 - protein, 10 aa, Homo sapiens
  Table 3 sequence identifier: P21333_C1165
  MOD_RES (2)..(2): May or may not be conjugated to a chemical probe
KCSGPGLERA

SEQ ID NO: 4174 - protein, 26 aa, Homo sapiens
  Table 3 sequence identifier: P13010_C296
  MOD_RES (6)..(6): May or may not be conjugated to a chemical probe
KETVYCLNDDDETEVLKEDIIQGFRY

SEQ ID NO: 4175 - protein, 22 aa, Homo sapiens
  Table 3 sequence identifier: Q9NRX1_C64
  MOD_RES (9)..(9): May or may not be conjugated to a chemical probe
KRPVFPPLCGDGLLSGKEETRK

SEQ ID NO: 4176 - protein, 13 aa, Homo sapiens
  Table 3 sequence identifier: Q9NRX2_C129
  MOD_RES (4)..(4): May or may not be conjugated to a chemical probe
KGNCLPPLPLPRR

SEQ ID NO: 4177 - protein, 25 aa, Homo sapiens
  Table 3 sequence identifier: O75414_C163
  MOD_RES (2)..(2): May or may not be conjugated to a chemical probe
RCGPVCYSPEGGVHYVAGTGGLGPA

SEQ ID NO: 4178 - protein, 39 aa, Homo sapiens
  Table 3 sequence identifier: Q96CU9_C116
  MOD_RES (18)..(18): May or may not be conjugated to a chemical probe
RDHTYSQASTGLSVGGICQQFSLPENIQLSLFSASFLRN

SEQ ID NO: 4179 - protein, 34 aa, Homo sapiens
  Table 3 sequence identifier: Q6DN90_C485
  MOD_RES (26)..(26): May or may not be conjugated to a chemical probe
KSESDYSDGDNDSINSTSNSNDTINCSSESSSRD

SEQ ID NO: 4180 - protein, 21 aa, Homo sapiens
  Table 3 sequence identifier: P01033_C168
  MOD_RES (8)..(8): May or may not be conjugated to a chemical probe
KLQSGTHCLWTDQLLQGSEKG

SEQ ID NO: 4181 - protein, 31 aa, Homo sapiens
  Table 3 sequence identifier: Q92616_C1161
  MOD_RES (15)..(15): May or may not be conjugated to a chemical probe
RLWSMMGLDLQPDLCSLLIDDVIYHEAAVRQ

SEQ ID NO: 4182 - protein, 12 aa, Homo sapiens
  Table 3 sequence identifier: Q53GL7_C50
  MOD_RES (4)..(4): May or may not be conjugated to a chemical probe
RLGCGGVLTFRE

SEQ ID NO: 4183 - protein, 44 aa, Homo sapiens
  Table 3 sequence identifier: Q9UH65_C260
  MOD_RES (31)..(31): May or may not be conjugated to a chemical probe
RWFVLKPNIISYYVSEDLKDKKGDILLDENCCVESLPDKDGKKC

SEQ ID NO: 4184 - protein, 23 aa, Homo sapiens
  Table 3 sequence identifier: Q9UH65_C261
  MOD_RES (11)..(11): May or may not be conjugated to a chemical probe
KGDILLDENCCVESLPDKDGKKC

SEQ ID NO: 4185 - protein, 29 aa, Homo sapiens
  Table 3 sequence identifier: P46060_C338
  MOD_RES (14)..(14): May or may not be conjugated to a chemical probe
KLDLNGNTLGEEGCEQLQEVLEGFNMAKV

SEQ ID NO: 4186 - protein, 8 aa, Homo sapiens
  Table 3 sequence identifier: P68402_C35
  MOD_RES (6)..(6): May or may not be conjugated to a chemical probe
RFVLDCKD

SEQ ID NO: 4187 - protein, 13 aa, Homo sapiens
  Table 3 sequence identifier: P61964_C205
  MOD_RES (10)..(10): May or may not be conjugated to a chemical probe
RIWDTASGQCLKT

SEQ ID NO: 4188 - protein, 13 aa, Homo sapiens
  Table 3 sequence identifier: P49327_C223
  MOD_RES (11)..(11): May or may not be conjugated to a chemical probe
KAFDTAGNGYCRS

SEQ ID NO: 4189 - protein, 14 aa, Homo sapiens
  Table 3 sequence identifier: Q99536_C86
  MOD_RES (3)..(3): May or may not be conjugated to a chemical probe
RACGLNFADLMARQ

SEQ ID NO: 4190 - protein, 10 aa, Homo sapiens
  Table 3 sequence identifier: Q8N1G4_C249
  MOD_RES (6)..(6): May or may not be conjugated to a chemical probe
KMVSGCQTRS

SEQ ID NO: 4191 - protein, 14 aa, Homo sapiens
  Table 3 sequence identifier: O14972_C221
  MOD_RES (7)..(7): May or may not be conjugated to a chemical probe
RVETCGCAEGYARD

SEQ ID NO: 4192 - protein, 38 aa, Homo sapiens
  Table 3 sequence identifier: O60232_C125
  MOD_RES (29)..(29): May or may not be conjugated to a chemical probe
REHQLASASELPLGSRPAPQPPVPRPEHCEGAAAGLKA

SEQ ID NO: 4193 - protein, 9 aa, Homo sapiens
  Table 3 sequence identifier: O95619_C210
  MOD_RES (6)..(6): May or may not be conjugated to a chemical probe
RETINCLKN

SEQ ID NO: 4194 - protein, 38 aa, Homo sapiens
  Table 3 sequence identifier: P57772_C93
  MOD_RES (29)..(29): May or may not be conjugated to a chemical probe
RSSLPEFQAAPEAEPEPGEPLLQVTLVDCPGHASLIRT

SEQ ID NO: 4195 - protein, 21 aa, Homo sapiens
  Table 3 sequence identifier: P13489_C248
  MOD_RES (11)..(11): May or may not be conjugated to a chemical probe
KLGDVGMAELCPGLLHPSSRL

SEQ ID NO: 4196 - protein, 16 aa, Homo sapiens
  Table 3 sequence identifier: P13489_C362
  MOD_RES (4)..(4): May or may not be conjugated to a chemical probe
RELCQGLGQPGSVLRV

SEQ ID NO: 4197 - protein, 16 aa, Homo sapiens
  Table 3 sequence identifier: Q8ND83_C449
  MOD_RES (5)..(5): May or may not be conjugated to a chemical probe
RIQSCIPSPGQLQHRV

SEQ ID NO: 4198 - protein, 11 aa, Homo sapiens
  Table 3 sequence identifier: Q9BUK6_C411
  MOD_RES (2)..(2): May or may not be conjugated to a chemical probe
RCFAQSVVLRG

SEQ ID NO: 4199 - protein, 26 aa, Homo sapiens
  Table 3 sequence identifier: Q12888_C329
  MOD_RES (6)..(6): May or may not be conjugated to a chemical probe
REEGGCSLASTPATTLHLLQLSGQRS

SEQ ID NO: 4200 - protein, 12 aa, Homo sapiens
  Table 3 sequence identifier: Q15910_C14
  MOD_RES (9)..(9): May or may not be conjugated to a chemical probe
KKSEKGPVCWRK

SEQ ID NO: 4201 - protein, 9 aa, Homo sapiens
  Table 3 sequence identifier: Q99832_C370
  MOD_RES (3)..(3): May or may not be conjugated to a chemical probe
KTCTFILRG

SEQ ID NO: 4202 - protein, 27 aa, Homo sapiens
  Table 3 sequence identifier: Q9BZH6_C363
  MOD_RES (10)..(10): May or may not be conjugated to a chemical probe
KTVRPFSMVCCPVNENAAALVVSDGRV

SEQ ID NO: 4203 - protein, 12 aa, Homo sapiens
  Table 3 sequence identifier: Q07864_C1935
  MOD_RES (4)..(4): May or may not be conjugated to a chemical probe
RIHCGLQDSQKA

SEQ ID NO: 4204 - protein, 15 aa, Homo sapiens
  Table 3 sequence identifier: Q92974_C383
  MOD_RES (7)..(7): May or may not be conjugated to a chemical probe
RHGVQECILLVTQRI

SEQ ID NO: 4205 - protein, 8 aa, Homo sapiens
  Table 3 sequence identifier: Q9BTE3_C636
  MOD_RES (2)..(2): May or may not be conjugated to a chemical probe
KCVNGNEL

SEQ ID NO: 4206 - protein, 22 aa, Homo sapiens
  Table 3 sequence identifier: P54578_C203
  MOD_RES (15)..(15): May or may not be conjugated to a chemical probe
KGEQGQYLQQDANECWIQMMRV

SEQ ID NO: 4207 - protein, 31 aa, Homo sapiens
  Table 3 sequence identifier: P54578_C415
  MOD_RES (16)..(16): May or may not be conjugated to a chemical probe
KYEPFSFADDIGSNNCGYYDLQAVLTHQGRS

SEQ ID NO: 4208 - protein, 36 aa, Homo sapiens
  Table 3 sequence identifier: O75995_C152
  MOD_RES (10)..(10): May or may not be conjugated to a chemical probe
RQASTGSELCSPSPGSGSFGEEPPAPQYTGPFCGRA

SEQ ID NO: 4209 - protein, 21 aa, Homo sapiens
  Table 3 sequence identifier: O95425_C671
  MOD_RES (6)..(6): May or may not be conjugated to a chemical probe
KESDRCTSHSETPTVDDEEKV

SEQ ID NO: 4210 - protein, 19 aa, Homo sapiens
  Table 3 sequence identifier: Q9UHI6_C577
  MOD_RES (13)..(13): May or may not be conjugated to a chemical probe
KEALPVSLPQIPCLSSFKI

SEQ ID NO: 4211 - protein, 11 aa, Homo sapiens
  Table 3 sequence identifier: Q9H9Q2_C240
  MOD_RES (3)..(3): May or may not be conjugated to a chemical probe
RECPPHAEQRQ

SEQ ID NO: 4212 - protein, 13 aa, Homo sapiens
  Table 3 sequence identifier: P62191_C58
  MOD_RES (11)..(11): May or may not be conjugated to a chemical probe
KLPLVTPHTQCRL

SEQ ID NO: 4213 - protein, 14 aa, Homo sapiens
  Table 3 sequence identifier: P62195_C363
  MOD_RES (4)..(4): May or may not be conjugated to a chemical probe
KGVCTEAGMYALRE

SEQ ID NO: 4214 - protein, 42 aa, Homo sapiens
  Table 3 sequence identifier: P11413_C294
  MOD_RES (5)..(5): May or may not be conjugated to a chemical probe
KVLKCISEVQANNVVLGQYVGNPDGEGEATKGYLDDPTVPRG

SEQ ID NO: 4215 - protein, 9 aa, Homo sapiens
  Table 3 sequence identifier: P11142_C267
  MOD_RES (6)..(6): May or may not be conjugated to a chemical probe
RLRTACERA

SEQ ID NO: 4216 - protein, 26 aa, Homo sapiens
  Table 3 sequence identifier: Q9NQX3_C419
  MOD_RES (10)..(10): May or may not be conjugated to a chemical probe
RVTTGAPIPCGADAVVQVEDTELIRE

SEQ ID NO: 4217 - protein, 18 aa, Homo sapiens
  Table 3 sequence identifier: P61081_C47
  MOD_RES (3)..(3): May or may not be conjugated to a chemical probe
KTCDISFSDPDDLLNFKL

SEQ ID NO: 4218 - protein, 28 aa, Homo sapiens
  Table 3 sequence identifier: Q9Y6W3_C767
  MOD_RES (2)..(2): May or may not be conjugated to a chemical probe
RCGFCYLELENIPSGIFNIIPSTFLPKQ

SEQ ID NO: 4219 - protein, 21 aa, Homo sapiens
  Table 3 sequence identifier: Q01844_C524
  MOD_RES (7)..(7): May or may not be conjugated to a chemical probe
RAGDWQCPNPGCGNQNFAWRT

SEQ ID NO: 4220 - protein, 24 aa, Homo sapiens
  Table 3 sequence identifier: Q9Y2Q3_C27
  MOD_RES (22)..(22): May or may not be conjugated to a chemical probe
RTVELFYDVLSPYSWLGFEILCRY

SEQ ID NO: 4221 - protein, 24 aa, Homo sapiens
  Table 3 sequence identifier: O60825_C28
  MOD_RES (2)..(2): May or may not be conjugated to a chemical probe
KCSWASYMTNSPTLIVMIGLPARG

SEQ ID NO: 4222 - protein, 21 aa, Homo sapiens
  Table 3 sequence identifier: Q9GZV4_C73
  MOD_RES (7)..(7): May or may not be conjugated to a chemical probe
KKYEDICPSTHNMDVPNIKRN

SEQ ID NO: 4223 - protein, 12 aa, Homo sapiens
  Table 3 sequence identifier: Q9NXV6_C24
  MOD_RES (2)..(2): May or may not be conjugated to a chemical probe
RCDGETDKHWRH

SEQ ID NO: 4224 - protein, 53 aa, Homo sapiens
  Table 3 sequence identifier: Q9UID3_C316
  MOD_RES (32)..(32): May or may not be conjugated to a chemical probe
RNLEAELGPSPPAPDVLEFTDHGGSGFVGGLCQVAAAYQELFAAQGPAGAEKL

SEQ ID NO: 4225 - protein, 23 aa, Homo sapiens
  Table 3 sequence identifier: Q99829_C30
  MOD_RES (6)..(6): May or may not be conjugated to a chemical probe
KSDPLCVLLQDVGGGSWAELGRT

SEQ ID NO: 4226 - protein, 45 aa, Homo sapiens
  Table 3 sequence identifier: Q5VT52_C416
  MOD_RES (5)..(5): May or may not be conjugated to a chemical probe
KASSCTPVPVTMTATPPLPKPVNTSLSPSPALALPNLANVDLAKI

SEQ ID NO: 4227 - protein, 24 aa, Homo sapiens
  Table 3 sequence identifier: P22314_C906
  MOD_RES (18)..(18): May or may not be conjugated to a chemical probe
KIIPAIATTTAAVVGLVCLELYKV

SEQ ID NO: 4228 - protein, 34 aa, Homo sapiens
  Table 3 sequence identifier: Q9UKV3_C691
  MOD_RES (30)..(30): May or may not be conjugated to a chemical probe
RDSSTSYTETKDPSSGQEVATPPVPQLQVCEPKE

SEQ ID NO: 4229 - protein, 26 aa, Homo sapiens
  Table 3 sequence identifier: Q86U28_C144
  MOD_RES (16)..(16): May or may not be conjugated to a chemical probe
RSSFQVLNNPQAQQGCSCGSSFSIKL

SEQ ID NO: 4230 - protein, 26 aa, Homo sapiens
  Table 3 sequence identifier: Q15814_C184
  MOD_RES (13)..(13): May or may not be conjugated to a chemical probe
KKAEGDLGPSWVCGFSNLESQVLEKR

SEQ ID NO: 4231 - protein, 11 aa, Homo sapiens
  Table 3 sequence identifier: P42695_C1484
  MOD_RES (8)..(8): May or may not be conjugated to a chemical probe
RNKDTPACSRR

SEQ ID NO: 4232 - protein, 16 aa, Homo sapiens
  Table 3 sequence identifier: Q14493_C72
  MOD_RES (2)..(2): May or may not be conjugated to a chemical probe
RCSDWASAVEEDEMRT

SEQ ID NO: 4233 - protein, 16 aa, Homo sapiens
  Table 3 sequence identifier: Q14258_C498
  MOD_RES (5)..(5): May or may not be conjugated to a chemical probe
RFTYCSQVLGLHCYKK

SEQ ID NO: 4234 - protein, 13 aa, Homo sapiens
  Table 3 sequence identifier: Q9H3U1_C384
  MOD_RES (8)..(8): May or may not be conjugated to a chemical probe
KLFDDLKCDAERE

SEQ ID NO: 4235 - protein, 27 aa, Homo sapiens
  Table 3 sequence identifier: O43374_C396
  MOD_RES (5)..(5): May or may not be conjugated to a chemical probe
KDVGCSGLHRPQTEAEVLEQSAQTLRA

SEQ ID NO: 4236 - protein, 9 aa, Homo sapiens
  Table 3 sequence identifier: P82921_C49
  MOD_RES (7)..(7): May or may not be conjugated to a chemical probe
RYYEKPCRR

SEQ ID NO: 4237 - protein, 39 aa, Homo sapiens
  Table 3 sequence identifier: P20810_C241
  MOD_RES (30)..(30): May or may not be conjugated to a chemical probe
KEGITGPPADSSKPIGPDDAIDALSSDFTCGSPTAAGKK

SEQ ID NO: 4238 - protein, 19 aa, Homo sapiens
  Table 3 sequence identifier: P20810_C413
  MOD_RES (5)..(5): May or may not be conjugated to a chemical probe
RTSMCSIQSAPPEPATLKG

SEQ ID NO: 4239 - protein, 40 aa, Homo sapiens
  Table 3 sequence identifier: Q9Y5S9_C149
  MOD_RES (36)..(36): May or may not be conjugated to a chemical probe
KGYTLVEYETYKEAQAAMEGLNGQDLMGQPISVDWCFVRG

SEQ ID NO: 4240 - protein, 18 aa, Homo sapiens
  Table 3 sequence identifier: P31997_C299
  MOD_RES (8)..(8): May or may not be conjugated to a chemical probe
KNSGSYACHTTNSATGRN

SEQ ID NO: 4241 - protein, 15 aa, Homo sapiens
  Table 3 sequence identifier: Q9ULV4_C39
  MOD_RES (9)..(9): May or may not be conjugated to a chemical probe
RVTWDSSFCAVNPRF

SEQ ID NO: 4242 - protein, 11 aa, Homo sapiens
  Table 3 sequence identifier: P11172_C174
  MOD_RES (6)..(6): May or may not be conjugated to a chemical probe
RLHSVCTLSKM

SEQ ID NO: 4243 - protein, 20 aa, Homo sapiens
  Table 3 sequence identifier: Q6NXE6_C297
  MOD_RES (14)..(14): May or may not be conjugated to a chemical probe
KAFLDNPGILSELCGTLSRL

SEQ ID NO: 4244 - protein, 13 aa, Homo sapiens
  Table 3 sequence identifier: Q92797_C578
  MOD_RES (5)..(5): May or may not be conjugated to a chemical probe
KAVACSGAAQVRI

SEQ ID NO: 4245 - protein, 33 aa, Homo sapiens
  Table 3 sequence identifier: P45984_C116
  MOD_RES (21)..(21): May or may not be conjugated to a chemical probe
KTLEEFQDVYLVMELMDANLCQVIHMELDHERM

SEQ ID NO: 4246 - protein, 22 aa, Homo sapiens
  Table 3 sequence identifier: P50995_C294
  MOD_RES (13)..(13): May or may not be conjugated to a chemical probe
KEAIKGVGTDEACLIEILASRS

SEQ ID NO: 4247 - protein, 17 aa, Homo sapiens
  Table 3 sequence identifier: O95376_C161
  MOD_RES (15)..(15): May or may not be conjugated to a chemical probe
RKENLLSLACQHQFCRS

SEQ ID NO: 4248 - protein, 27 aa, Homo sapiens
  Table 3 sequence identifier: B0V043_C381
  MOD_RES (13)..(13): May or may not be conjugated to a chemical probe
RMRGETTLWNPGCDHAGIATQVVVEKK

SEQ ID NO: 4249 - protein, 10 aa, Homo sapiens
  Table 3 sequence identifier: B0V043_C444
  MOD_RES (3)..(3): May or may not be conjugated to a chemical probe
RACFTMDPKL

SEQ ID NO: 4250 - protein, 10 aa, Homo sapiens
  Table 3 sequence identifier: P49848_C130
  MOD_RES (7)..(7): May or may not be conjugated to a chemical probe
RVPLDVCLKA

SEQ ID NO: 4251 - protein, 11 aa, Homo sapiens
  Table 3 sequence identifier: Q86UV5_C850
  MOD_RES (6)..(6): May or may not be conjugated to a chemical probe
REGLLCQQQRD

SEQ ID NO: 4252 - protein, 17 aa, Homo sapiens
  Table 3 sequence identifier: Q9Y2H0_C726
  MOD_RES (15)..(15): May or may not be conjugated to a chemical probe
RDTDSDTQDANDSSCKS

SEQ ID NO: 4253 - protein, 26 aa, Homo sapiens
  Table 3 sequence identifier: Q92947_C176
  MOD_RES (7)..(7): May or may not be conjugated to a chemical probe
KGELLGCFGLTEPNSGSDPSSMETRA

SEQ ID NO: 4254 - protein, 8 aa, Homo sapiens
  Table 3 sequence identifier: Q9UKW4_C800
  MOD_RES (5)..(5): May or may not be conjugated to a chemical probe
RYDFCARD

SEQ ID NO: 4255 - protein, 23 aa, Homo sapiens
  Table 3 sequence identifier: P35610_C92
  MOD_RES (10)..(10): May or may not be conjugated to a chemical probe
KSASLDNGGCALTTFSVLEGEKN

SEQ ID NO: 4256 - protein, 13 aa, Homo sapiens
  Table 3 sequence identifier: Q14318_C274
  MOD_RES (2)..(2): May or may not be conjugated to a chemical probe
KCLNNLAASQLKL

SEQ ID NO: 4257 - protein, 19 aa, Homo sapiens
  Table 3 sequence identifier: Q14315_C2154
  MOD_RES (13)..(13): May or may not be conjugated to a chemical probe
RQAPSIATIGSTCDLNLKI

SEQ ID NO: 4258 - protein, 18 aa, Homo sapiens
  Table 3 sequence identifier: P22234_C281
  MOD_RES (15)..(15): May or may not be conjugated to a chemical probe
RVVVLMGSTSDLGHCEKI

SEQ ID NO: 4259 - protein, 7 aa, Homo sapiens
  Table 3 sequence identifier: P22234_C423
  MOD_RES (5)..(5): May or may not be conjugated to a chemical probe
KIRECNL

SEQ ID NO: 4260 - protein, 20 aa, Homo sapiens
  Table 3 sequence identifier: Q969Z0_C370
  MOD_RES (11)..(11): May or may not be conjugated to a chemical probe
RAQDITLPHLCSVLLAFARL

SEQ ID NO: 4261 - protein, 20 aa, Homo sapiens
  Table 3 sequence identifier: Q8WUM4_C40
  MOD_RES (18)..(18): May or may not be conjugated to a chemical probe
KFIQQTYPSGGEEQAQYCRA

SEQ ID NO: 4262 - protein, 14 aa, Homo sapiens
  Table 3 sequence identifier: Q9H9A6_C264
  MOD_RES (9)..(9): May or may not be conjugated to a chemical probe
RFLPEFPSCSLLKE

SEQ ID NO: 4263 - protein, 9 aa, Homo sapiens
  Table 3 sequence identifier: P33764_C30
  MOD_RES (3)..(3): May or may not be conjugated to a chemical probe
KLCQAELKE

SEQ ID NO: 4264 - protein, 31 aa, Homo sapiens
  Table 3 sequence identifier: P38936_C117
  MOD_RES (25)..(25): May or may not be conjugated to a chemical probe
RRPGTSPALLQGTAEEDHVDLSLSCTLVPRS

SEQ ID NO: 4265 - protein, 24 aa, Homo sapiens
  Table 3 sequence identifier: Q9UPU5_C1362
  MOD_RES (18)..(18): May or may not be conjugated to a chemical probe
RLDLVGSSQPIKESNSLCPAGIRN

SEQ ID NO: 4266 - protein, 13 aa, Homo sapiens
  Table 3 sequence identifier: Q8IWD4_C81
  MOD_RES (9)..(9): May or may not be conjugated to a chemical probe
REEEEDDDCPVRK

SEQ ID NO: 4267 - protein, 12 aa, Homo sapiens
  Table 3 sequence identifier: Q96GM8_C80
  MOD_RES (7)..(7): May or may not be conjugated to a chemical probe
KSLLNQCIEERY

SEQ ID NO: 4268 - protein, 53 aa, Homo sapiens
  Table 3 sequence identifier: Q9UJY4_C347
  MOD_RES (3)..(3): May or may not be conjugated to a chemical probe
KTCPLIDLEVDNGPAQMGTVVPSLLHQDLAALGISDAPVTGMVSGQNCCEEKR

SEQ ID NO: 4269 - protein, 29 aa, Homo sapiens
  Table 3 sequence identifier: P12236_C129
  MOD_RES (19)..(19): May or may not be conjugated to a chemical probe
RYFAGNLASGGAAGATSLCFVYPLDFART

SEQ ID NO: 4270 - protein, 16 aa, Homo sapiens
  Table 3 sequence identifier: Q9NXH9_C620
  MOD_RES (5)..(5): May or may not be conjugated to a chemical probe
RGDQCCYSHSPPTPRV

SEQ ID NO: 4271 - protein, 13 aa, Homo sapiens
  Table 3 sequence identifier: Q7L0Y3_C123
  MOD_RES (6)..(6): May or may not be conjugated to a chemical probe
KTLMECVSNTAKK

SEQ ID NO: 4272 - protein, 11 aa, Homo sapiens
  Table 3 sequence identifier: Q08211_C12
  MOD_RES (8)..(8): May or may not be conjugated to a chemical probe
KNFLYAWCGKR

SEQ ID NO: 4273 - protein, 10 aa, Homo sapiens
  Table 3 sequence identifier: Q9Y4I1_C535
  MOD_RES (2)..(2): May or may not be conjugated to a chemical probe
KCALFEKPRL

SEQ ID NO: 4274 - protein, 12 aa, Homo sapiens
  Table 3 sequence identifier: P08240_C253
  MOD_RES (8)..(8): May or may not be conjugated to a chemical probe
RVWELGGCANKE

SEQ ID NO: 4275 - protein, 29 aa, Homo sapiens
  Table 3 sequence identifier: Q5TFE4_C399
  MOD_RES (27)..(27): May or may not be conjugated to a chemical probe
KKWGSFFIDSVLGLENTEDSLVYTWSCKR

SEQ ID NO: 4276 - protein, 9 aa, Homo sapiens
  Table 3 sequence identifier: Q8NFW8_C364
  MOD_RES (6)..(6): May or may not be conjugated to a chemical probe
KEMGLCWKE

SEQ ID NO: 4277 - protein, 25 aa, Homo sapiens
  Table 3 sequence identifier: O95817_C373
  MOD_RES (9)..(9): May or may not be conjugated to a chemical probe
KVPPAPVPCPPPSPGPSAVPSSPKS

SEQ ID NO: 4278 - protein, 28 aa, Homo sapiens
  Table 3 sequence identifier: Q92541_C599
  MOD_RES (3)..(3): May or may not be conjugated to a chemical probe
RQCKPTIVSNSRDPAVQAAILAQLNAKY

SEQ ID NO: 4279 - protein, 10 aa, Homo sapiens
  Table 3 sequence identifier: P52789_C375
  MOD_RES (3)..(3): May or may not be conjugated to a chemical probe
RICQIVSTRS

SEQ ID NO: 4280 - protein, 21 aa, Homo sapiens
  Table 3 sequence identifier: P52789_C813
  MOD_RES (13)..(13): May or may not be conjugated to a chemical probe
RAILQHLGLESTCDDSIIVKE

SEQ ID NO: 4281 - protein, 23 aa, Homo sapiens
  Table 3 sequence identifier: Q01469_C87
  MOD_RES (6)..(6): May or may not be conjugated to a chemical probe
KTQTVCNFTDGALVQHQEWDGKE

SEQ ID NO: 4282 - protein, 11 aa, Homo sapiens
  Table 3 sequence identifier: O43172_C342
  MOD_RES (7)..(7): May or may not be conjugated to a chemical probe
RFLGTTCYDRS

SEQ ID NO: 4283 - protein, 18 aa, Homo sapiens
  Table 3 sequence identifier: O43175_C48
  MOD_RES (11)..(11): May or may not be conjugated to a chemical probe
KEELIAELQDCEGLIVRS

SEQ ID NO: 4284 - protein, 8 aa, Homo sapiens
  Table 3 sequence identifier: O43175_C234
  MOD_RES (5)..(5): May or may not be conjugated to a chemical probe
RVVNCARG

SEQ ID NO: 4285 - protein, 26 aa, Homo sapiens
  Table 3 sequence identifier: P22059_C344
  MOD_RES (22)..(22): May or may not be conjugated to a chemical probe
RGATVLPANTPGNVGSGKDQCCSGKG

SEQ ID NO: 4286 - protein, 19 aa, Homo sapiens
  Table 3 sequence identifier: Q14699_C551
  MOD_RES (7)..(7): May or may not be conjugated to a chemical probe
RALVGICTGHSNPGEDARD

SEQ ID NO: 4287 - protein, 41 aa, Homo sapiens
  Table 3 sequence identifier: Q14697_C822
  MOD_RES (5)..(5): May or may not be conjugated to a chemical probe
RSSECMKDDPITLFVALSPQGTAQGELFLDDGHTFNYQTRQ

SEQ ID NO: 4288 - protein, 15 aa, Homo sapiens
  Table 3 sequence identifier: Q15654_C310
  MOD_RES (13)..(13): May or may not be conjugated to a chemical probe
RVFHVGCFVCSTCRA

SEQ ID NO: 4289 - protein, 15 aa, Homo sapiens
  Table 3 sequence identifier: Q15654_C328
  MOD_RES (4)..(4): May or may not be conjugated to a chemical probe
RAYCEGCYVATLEKC

SEQ ID NO: 4290 - protein, 11 aa, Homo sapiens
  Table 3 sequence identifier: Q15652_C684
  MOD_RES (2)..(2): May or may not be conjugated to a chemical probe
RCSFHPIPTRS

SEQ ID NO: 4291 - protein, 11 aa, Homo sapiens
  Table 3 sequence identifier: Q9NU22_C1867
  MOD_RES (5)..(5): May or may not be conjugated to a chemical probe
KIFGCQNPFRQ

SEQ ID NO: 4292 - protein, 29 aa, Homo sapiens
  Table 3 sequence identifier: Q13439_C1862
  MOD_RES (23)..(23): May or may not be conjugated to a chemical probe
KTLQEKELTCQILEQKIKELDSCLVRQKE

SEQ ID NO: 4293 - protein, 12 aa, Homo sapiens
  Table 3 sequence identifier: Q9UPT8_C1302
  MOD_RES (11)..(11): May or may not be conjugated to a chemical probe
KGFDPTASPFCQ

SEQ ID NO: 4294 - protein, 11 aa, Homo sapiens
  Table 3 sequence identifier: Q9NXG2_C169
  MOD_RES (9)..(9): May or may not be conjugated to a chemical probe
RMLPISGTCKA

SEQ ID NO: 4295 - protein, 19 aa, Homo sapiens
  Table 3 sequence identifier: Q27J81_C1029
  MOD_RES (2)..(2): May or may not be conjugated to a chemical probe
RCPASEPGLDATTASESRG

SEQ ID NO: 4296 - protein, 14 aa, Homo sapiens
  Table 3 sequence identifier: P01892_C188
  MOD_RES (8)..(8): May or may not be conjugated to a chemical probe
RAYLEGTCVEWLRR

SEQ ID NO: 4297 - protein, 11 aa, Homo sapiens
  Table 3 sequence identifier: P60903_C62
  MOD_RES (6)..(6): May or may not be conjugated to a chemical probe
KDLDQCRDGKV

SEQ ID NO: 4298 - protein, 13 aa, Homo sapiens
  Table 3 sequence identifier: P51553_C236
  MOD_RES (11)..(11): May or may not be conjugated to a chemical probe
KLGDGLFLQCCRE

SEQ ID NO: 4299 - protein, 11 aa, Homo sapiens
  Table 3 sequence identifier: P51003_C36
  MOD_RES (5)..(5): May or may not be conjugated to a chemical probe
KETDCVLTQKL

SEQ ID NO: 4300 - protein, 12 aa, Homo sapiens
  Table 3 sequence identifier: P50213_C351
  MOD_RES (2)..(2): May or may not be conjugated to a chemical probe
KCSDFTEEICRR

SEQ ID NO: 4301 - protein, 14 aa, Homo sapiens
  Table 3 sequence identifier: P62873_C204
  MOD_RES (8)..(8): May or may not be conjugated to a chemical probe
RLFVSGACDASAKL

SEQ ID NO: 4302 - protein, 26 aa, Homo sapiens
  Table 3 sequence identifier: Q15003_C255
  MOD_RES (9)..(9): May or may not be conjugated to a chemical probe
KTAASFDECSTAGVFLSTLHCQDYRS

SEQ ID NO: 4303 - protein, 8 aa, Homo sapiens
  Table 3 sequence identifier: O00764_C273
  MOD_RES (5)..(5): May or may not be conjugated to a chemical probe
RTIQCAKA

SEQ ID NO: 4304 - protein, 18 aa, Homo sapiens
  Table 3 sequence identifier: Q9BZL6_C217
  MOD_RES (10)..(10): May or may not be conjugated to a chemical probe
RLGTSESLPCTAEELSRS

SEQ ID NO: 4305 - protein, 35 aa, Homo sapiens
  Table 3 sequence identifier: O75534_C506
  MOD_RES (32)..(32): May or may not be conjugated to a chemical probe
KDVEGSTSPQIGDKVEFSISDKQRPGQQVATCVRL

SEQ ID NO: 4306 - protein, 19 aa, Homo sapiens
  Table 3 sequence identifier: Q9C0B1_C397
  MOD_RES (7)..(7): May or may not be conjugated to a chemical probe
KCTDWWCQPMAQLEALWKK

SEQ ID NO: 4307 - protein, 13 aa, Homo sapiens
  Table 3 sequence identifier: O75223_C42
  MOD_RES (9)..(9): May or may not be conjugated to a chemical probe
RNPSAAFFCVARL

SEQ ID NO: 4308 - protein, 9 aa, Homo sapiens
  Table 3 sequence identifier: Q13155_C168
  MOD_RES (2)..(2): May or may not be conjugated to a chemical probe
KCFGEQNKK

SEQ ID NO: 4309 - protein, 12 aa, Homo sapiens
  Table 3 sequence identifier: Q14204_C3389
  MOD_RES (6)..(6): May or may not be conjugated to a chemical probe
RASLACGPMVKW

SEQ ID NO: 4310 - protein, 9 aa, Homo sapiens
  Table 3 sequence identifier: Q8WXI9_C409
  MOD_RES (3)..(3): May or may not be conjugated to a chemical probe
KSCASLLRV

SEQ ID NO: 4311 - protein, 30 aa, Homo sapiens
  Table 3 sequence identifier: P07814_C1301
  MOD_RES (4)..(4): May or may not be conjugated to a chemical probe
RVACVQVVIIPCGITNALSEEDKEALIAKC

SEQ ID NO: 4312 - protein, 21 aa, Homo sapiens
  Table 3 sequence identifier: P22102_C62
  MOD_RES (19)..(19): May or may not be conjugated to a chemical probe
KISNTAISISDHTALAQFCKE

SEQ ID NO: 4313 - protein, 11 aa, Homo sapiens
  Table 3 sequence identifier: O75643_C428
  MOD_RES (2)..(2): May or may not be conjugated to a chemical probe
RCQLPDGSFRR

SEQ ID NO: 4314 - protein, 24 aa, Homo sapiens
  Table 3 sequence identifier: Q9ULL5_C173
  MOD_RES (20)..(20): May or may not be conjugated to a chemical probe
KAGAGPPPGPPAYDPYGPYCPGRA

SEQ ID NO: 4315 - protein, 12 aa, Homo sapiens
  Table 3 sequence identifier: Q14738_C484
  MOD_RES (6)..(6): May or may not be conjugated to a chemical probe
KLFDDCTQQYKA

SEQ ID NO: 4316 - protein, 23 aa, Homo sapiens
  Table 3 sequence identifier: P50851_C1843
  MOD_RES (20)..(20): May or may not be conjugated to a chemical probe
RTLLGSHGQELLIEGTSLVCMKS

SEQ ID NO: 4317 - protein, 23 aa, Homo sapiens
  Table 3 sequence identifier: Q9H668_C8
  MOD_RES (2)..(2): May or may not be conjugated to a chemical probe
RCEEETPSLLWGLDPVFLAFAKL

SEQ ID NO: 4318 - protein, 31 aa, Homo sapiens
  Table 3 sequence identifier: Q15643_C1329
  MOD_RES (28)..(28): May or may not be conjugated to a chemical probe
KDLLLGKLDIISPQLSSASLLTPQSAECLRA

SEQ ID NO: 4319 - protein, 24 aa, Homo sapiens
  Table 3 sequence identifier: Q13422_C394
  MOD_RES (9)..(9): May or may not be conjugated to a chemical probe
REASPSNSCQDSTDTESNNEEQRS

SEQ ID NO: 4320 - protein, 11 aa, Homo sapiens
  Table 3 sequence identifier: P48739_C94
  MOD_RES (9)..(9): May or may not be conjugated to a chemical probe
KAWNAYPYCRT

SEQ ID NO: 4321 - protein, 15 aa, Homo sapiens
  Table 3 sequence identifier: Q9UJM3_C378
  MOD_RES (4)..(4): May or may not be conjugated to a chemical probe
KVPCILPIIENGKKV

SEQ ID NO: 4322 - protein, 11 aa, Homo sapiens
  Table 3 sequence identifier: P62136_C140
  MOD_RES (9)..(9): May or may not be conjugated to a chemical probe
RIYGFYDECKR

SEQ ID NO: 4323 - protein, 10 aa, Homo sapiens
  Table 3 sequence identifier: P13674_C528
  MOD_RES (4)..(4): May or may not be conjugated to a chemical probe
RRPCTLSELE

SEQ ID NO: 4324 - protein, 10 aa, Homo sapiens
  Table 3 sequence identifier: Q9NVX2_C280
  MOD_RES (8)..(8): May or may not be conjugated to a chemical probe
RAHDGVLCRT

SEQ ID NO: 4325 - protein, 11 aa, Homo sapiens
  Table 3 sequence identifier: Q6IA86_C68
  MOD_RES (9)..(9): May or may not be conjugated to a chemical probe
RVNCIQWICKQ

SEQ ID NO: 4326 - protein, 25 aa, Homo sapiens
  Table 3 sequence identifier: P45954_C308
  MOD_RES (15)..(15): May or may not be conjugated to a chemical probe
RIGIAAQMLGLAQGCFDYTIPYIKE

SEQ ID NO: 4327 - protein, 14 aa, Homo sapiens
  Table 3 sequence identifier: O94921_C100
  MOD_RES (9)..(9): May or may not be conjugated to a chemical probe
RVHSENNACINFKT

SEQ ID NO: 4328 - protein, 14 aa, Homo sapiens
  Table 3 sequence identifier: Q3KQU3_C361
  MOD_RES (11)..(11): May or may not be conjugated to a chemical probe
RTHPSAAVPVCPRS

SEQ ID NO: 4329 - protein, 20 aa, Homo sapiens
  Table 3 sequence identifier: Q8IVM0_C85
  MOD_RES (10)..(10): May or may not be conjugated to a chemical probe
RYKDLEQQDCEIAQEIQEKL

SEQ ID NO: 4330 - protein, 17 aa, Homo sapiens
  Table 3 sequence identifier: P52630_C74
  MOD_RES (2)..(2): May or may not be conjugated to a chemical probe
RCSQDPESLLLQHNLRK

SEQ ID NO: 4331 - protein, 11 aa, Homo sapiens
  Table 3 sequence identifier: P52630_C529
  MOD_RES (9)..(9): May or may not be conjugated to a chemical probe
RNKLFGQNCRT

SEQ ID NO: 4332 - protein, 27 aa, Homo sapiens
  Table 3 sequence identifier: P42704_C571
  MOD_RES (22)..(22): May or may not be conjugated to a chemical probe
RSMNINLWSEITELLYKDGRYCQEPRG

SEQ ID NO: 4333 - protein, 45 aa, Homo sapiens
  Table 3 sequence identifier: P42704_C1043
  MOD_RES (43)..(43): May or may not be conjugated to a chemical probe
REGNQEVPFDVPELWYEDEKHSLNSSSASTTEPDFQKDILIACRL

SEQ ID NO: 4334 - protein, 24 aa, Homo sapiens
  Table 3 sequence identifier: Q99598_C202
  MOD_RES (3)..(3): May or may not be conjugated to a chemical probe
RMCINSVGNGDIDTPFEVSQFLRQ

SEQ ID NO: 4335 - protein, 16 aa, Homo sapiens
  Table 3 sequence identifier: P34932_C376
  MOD_RES (3)..(3): May or may not be conjugated to a chemical probe
RGCALQCAILSPAFKV

SEQ ID NO: 4336 - protein, 12 aa, Homo sapiens
  Table 3 sequence identifier: Q14980_C65
  MOD_RES (6)..(6): May or may not be conjugated to a chemical probe
RLDFVCSFLQKN

SEQ ID NO: 4337 - protein, 18 aa, Homo sapiens
  Table 3 sequence identifier: Q14980_C1367
  MOD_RES (4)..(4): May or may not be conjugated to a chemical probe
KHLCQQLQAEQAAAEKRH

SEQ ID NO: 4338 - protein, 26 aa, Homo sapiens
  Table 3 sequence identifier: Q9BYV8_C274
  MOD_RES (15)..(15): May or may not be conjugated to a chemical probe
KFPEGLITGSLPASCQQALPPGSARK

SEQ ID NO: 4339 - protein, 9 aa, Homo sapiens
  Table 3 sequence identifier: P51970_C66
  MOD_RES (2)..(2): May or may not be conjugated to a chemical probe
KCALDFFRQ

SEQ ID NO: 4340 - protein, 15 aa, Homo sapiens
  Table 3 sequence identifier: Q01433_C230
  MOD_RES (2)..(2): May or may not be conjugated to a chemical probe
KCGVPFTDLLDAAKS

SEQ ID NO: 4341 - protein, 13 aa, Homo sapiens
  Table 3 sequence identifier: P55212_C68
  MOD_RES (4)..(4): May or may not be conjugated to a chemical probe
RGTCADRDNLTRR

SEQ ID NO: 4342 - protein, 21 aa, Homo sapiens
  Table 3 sequence identifier: Q5SW79_C235
  MOD_RES (19)..(19): May or may not be conjugated to a chemical probe
KQVEEQSAAANEEVLFPFCRE

SEQ ID NO: 4343 - protein, 17 aa, Homo sapiens
  Table 3 sequence identifier: Q9NQG5_C234
  MOD_RES (7)..(7): May or may not be conjugated to a chemical probe
KTVDEACLLLAEYNGRL

SEQ ID NO: 4344 - protein, 13 aa, Homo sapiens
  Table 3 sequence identifier: O00743_C265
  MOD_RES (2)..(2): May or may not be conjugated to a chemical probe
RCGNIASIMVFKD

SEQ ID NO: 4345 - protein, 32 aa, Homo sapiens
  Table 3 sequence identifier: P10515_C586
  MOD_RES (13)..(13): May or may not be conjugated to a chemical probe
KNFSAIINPPQACILAIGASEDKLVPADNEKG

SEQ ID NO: 4346 - protein, 17 aa, Homo sapiens
  Table 3 sequence identifier: P28340_C360
  MOD_RES (9)..(9): May or may not be conjugated to a chemical probe
RLALTLRPCAPILGAKV

SEQ ID NO: 4347 - protein, 18 aa, Homo sapiens
  Table 3 sequence identifier: P28340_C1029
  MOD_RES (14)..(14): May or may not be conjugated to a chemical probe
RTVLSHQGAVCEFCQPRE

SEQ ID NO: 4348 - protein, 26 aa, Homo sapiens
  Table 3 sequence identifier: Q86VP6_C179
  MOD_RES (16)..(16): May or may not be conjugated to a chemical probe
RQGGLLVNFHPSILTCLLPQLTSPRL

SEQ ID NO: 4349 - protein, 11 aa, Homo sapiens
  Table 3 sequence identifier: Q86VP6_C954
  MOD_RES (7)..(7): May or may not be conjugated to a chemical probe
RNVVAECLGKL

SEQ ID NO: 4350 - protein, 44 aa, Homo sapiens
  Table 3 sequence identifier: P54886_C486
  MOD_RES (25)..(25): May or may not be conjugated to a chemical probe
KNLELEQVTVPIGVLLVIFESRPDCLPQVAALAIASGNGLLLKG

SEQ ID NO: 4351 - protein, 10 aa, Homo sapiens
  Table 3 sequence identifier: P54886_C546
  MOD_RES (8)..(8): May or may not be conjugated to a chemical probe
REEVEDLCRL

SEQ ID NO: 4352 - protein, 43 aa, Homo sapiens
  Table 3 sequence identifier: Q8N0X7_C288
  MOD_RES (2)..(2): May or may not be conjugated to a chemical probe
KCTAGAYMFPDTMLQAAGCFVGVVLSSELPEDDRELFEDLLRQ

SEQ ID NO: 4353 - protein, 15 aa, Homo sapiens
  Table 3 sequence identifier: Q8TB52_C723
  MOD_RES (9)..(9): May or may not be conjugated to a chemical probe
REEAIPLPCMCVTRE

SEQ ID NO: 4354 - protein, 20 aa, Homo sapiens
  Table 3 sequence identifier: Q14152_C404
  MOD_RES (17)..(17): May or may not be conjugated to a chemical probe
KDLYNWLEVEFNPLKLCERV

SEQ ID NO: 4355 - protein, 14 aa, Homo sapiens
  Table 3 sequence identifier: P21281_C112
  MOD_RES (5)..(5): May or may not be conjugated to a chemical probe
KKTSCEFTGDILRT

SEQ ID NO: 4356 - protein, 22 aa, Homo sapiens
  Table 3 sequence identifier: P21281_C207
  MOD_RES (20)..(20): May or may not be conjugated to a chemical probe
KIPIFSAAGLPHNEIAAQICRQ

SEQ ID NO: 4357 - protein, 10 aa, Homo sapiens
  Table 3 sequence identifier: O75116_C804
  MOD_RES (2)..(2): May or may not be conjugated to a chemical probe
RCLTQNDLKM

SEQ ID NO: 4358 - protein, 17 aa, Homo sapiens
  Table 3 sequence identifier: Q5UIP0_C2169
  MOD_RES (2)..(2): May or may not be conjugated to a chemical probe
RCVWSPLASPSTSILKR

SEQ ID NO: 4359 - protein, 23 aa, Homo sapiens
  Table 3 sequence identifier: Q9BW27_C515
  MOD_RES (3)..(3): May or may not be conjugated to a chemical probe
RGCFSDLDLIDNLGPAMMLSDRL

SEQ ID NO: 4360 - protein, 26 aa, Homo sapiens
  Table 3 sequence identifier: P55199_C70
  MOD_RES (20)..(20): May or may not be conjugated to a chemical probe
RPSIRFQGSQGHISIPQPDCPAEART

SEQ ID NO: 4361 - protein, 46 aa, Homo sapiens
  Table 3 sequence identifier: Q8WXE1_C74
  MOD_RES (40)..(40): May or may not be conjugated to a chemical probe
RGFSAAAAPDPDDPFGAHGDFTADDLEELDTLASQALSQCPAAARD

SEQ ID NO: 4362 - protein, 10 aa, Homo sapiens
  Table 3 sequence identifier: O14526_C571
  MOD_RES (5)..(5): May or may not be conjugated to a chemical probe
RKVSCPLTRS

SEQ ID NO: 4363 - protein, 30 aa, Homo sapiens
  Table 3 sequence identifier: Q9NSD9_C362
  MOD_RES (8)..(8): May or may not be conjugated to a chemical probe
RADIIHACDIVEDAAIAYGYNNIQMTLPKT

SEQ ID NO: 4364 - protein, 15 aa, Homo sapiens
  Table 3 sequence identifier: Q8WUW1_C43
  MOD_RES (13)..(13): May or may not be conjugated to a chemical probe
KIADFLNSFDMSCRS

SEQ ID NO: 4365 - protein, 12 aa, Homo sapiens
  Table 3 sequence identifier: Q12874_C145
  MOD_RES (8)..(8): May or may not be conjugated to a chemical probe
RYLDLHDCYLKY

SEQ ID NO: 4366 - protein, 19 aa, Homo sapiens
  Table 3 sequence identifier: Q9Y6A5_C20
  MOD_RES (6)..(6): May or may not be conjugated to a chemical probe
KNTENCDFLFSPPEVTGRS

SEQ ID NO: 4367 - protein, 17 aa, Homo sapiens
  Table 3 sequence identifier: Q9Y6A5_C426
  MOD_RES (4)..(4): May or may not be conjugated to a chemical probe
KSGCSEAQPPESPETRL

SEQ ID NO: 4368 - protein, 18 aa, Homo sapiens
  Table 3 sequence identifier: Q92878_C133
  MOD_RES (2)..(2): May or may not be conjugated to a chemical probe
KCAEIDREMISSLGVSKA

SEQ ID NO: 4369 - protein, 30 aa, Homo sapiens
  Table 3 sequence identifier: Q9BXK1_C233
  MOD_RES (11)..(11): May or may not be conjugated to a chemical probe
RSTSPSDSLPCSLAGSPAPSPAPSPAPAGL

SEQ ID NO: 4370 - protein, 21 aa, Homo sapiens
  Table 3 sequence identifier: Q68CZ2_C842
  MOD_RES (5)..(5): May or may not be conjugated to a chemical probe
KESMCSTPAFPVSPETPYVKT

SEQ ID NO: 4371 - protein, 34 aa, Homo sapiens
  Table 3 sequence identifier: O75616_C86
  MOD_RES (25)..(25): May or may not be conjugated to a chemical probe
RSNGQGSALDHFLGFSQPDSSVTPCVPAVSMNRD

SEQ ID NO: 4372 - protein, 11 aa, Homo sapiens
  Table 3 sequence identifier: P18031_C32
  MOD_RES (9)..(9): May or may not be conjugated to a chemical probe
RHEASDFPCRV

SEQ ID NO: 4373 - protein, 20 aa, Homo sapiens
  Table 3 sequence identifier: Q9UHB6_C316
  MOD_RES (11)..(11): May or may not be conjugated to a chemical probe
KENVPPGPEVCITHQEGEKI

SEQ ID NO: 4374 - protein, 16 aa, Homo sapiens
  Table 3 sequence identifier: Q9UHB6_C414
  MOD_RES (13)..(13): May or may not be conjugated to a chemical probe
RLLANQQVFHISCFRC

SEQ ID NO: 4375 - protein, 42 aa, Homo sapiens
  Table 3 sequence identifier: Q9NZ52_C396
  MOD_RES (28)..(28): May or may not be conjugated to a chemical probe
RSSSQAEATLGPSSTSNALSWLDEELLCLGLADPAPNVPPKE

SEQ ID NO: 4376 - protein, 16 aa, Homo sapiens
  Table 3 sequence identifier: Q9UBT2_C185
  MOD_RES (10)..(10): May or may not be conjugated to a chemical probe
RNTPSEPIHCIVWAKY

SEQ ID NO: 4377 - protein, 19 aa, Homo sapiens
  Table 3 sequence identifier: Q15723_C470
  MOD_RES (13)..(13): May or may not be conjugated to a chemical probe
KIITIPATQLAQCQLQTKS

SEQ ID NO: 4378 - protein, 10 aa, Homo sapiens
  Table 3 sequence identifier: Q9H5V9_C11
  MOD_RES (5)..(5): May or may not be conjugated to a chemical probe
RSVVCSDTRD

SEQ ID NO: 4379 - protein, 38 aa, Homo sapiens
  Table 3 sequence identifier: O14980_C199
  MOD_RES (5)..(5): May or may not be conjugated to a chemical probe
KDSMCNEFSQIFQLCQFVMENSQNAPLVHATLETLLRF

SEQ ID NO: 4380 - protein, 36 aa, Homo sapiens
  Table 3 sequence identifier: P15104_C53
  MOD_RES (2)..(2): May or may not be conjugated to a chemical probe
KCVEELPEWNFDGSSTLQSEGSNSDMYLVPAAMFRD

SEQ ID NO: 4381 - protein, 35 aa, Homo sapiens
  Table 3 sequence identifier: P13796_C206
  MOD_RES (23)..(23): May or may not be conjugated to a chemical probe
KLTPFTIQENLNLALNSASAIGCHVVNIGAEDLKE

SEQ ID NO: 4382 - protein, 11 aa, Homo sapiens
  Table 3 sequence identifier: O95071_C2084
  MOD_RES (2)..(2): May or may not be conjugated to a chemical probe
KCLMEVTVDRN

SEQ ID NO: 4383 - protein, 26 aa, Homo sapiens
  Table 3 sequence identifier: Q6XZF7_C909
  MOD_RES (9)..(9): May or may not be conjugated to a chemical probe
KSLYNEWGCTNYINLGSFLIKPVQRV

SEQ ID NO: 4384 - protein, 12 aa, Homo sapiens
  Table 3 sequence identifier: Q9NXR7_C34
  MOD_RES (9)..(9): May or may not be conjugated to a chemical probe
KVGLDATNCLRI

SEQ ID NO: 4385 - protein, 11 aa, Homo sapiens
  Table 3 sequence identifier: Q9NQW6_C61
  MOD_RES (3)..(3): May or may not be conjugated to a chemical probe
KSCTKPSPSKK

SEQ ID NO: 4386 - protein, 17 aa, Homo sapiens
  Table 3 sequence identifier: Q9NQW6_C234
  MOD_RES (13)..(13): May or may not be conjugated to a chemical probe
KQNSVQEQPGTACLSKF

SEQ ID NO: 4387 - protein, 16 aa, Homo sapiens
  Table 3 sequence identifier: Q6P587_C129
  MOD_RES (7)..(7): May or may not be conjugated to a chemical probe
KSFTASCPVSAFVPKE

SEQ ID NO: 4388 - protein, 12 aa, Homo sapiens
  Table 3 sequence identifier: Q8NC96_C162
  MOD_RES (3)..(3): May or may not be conjugated to a chemical probe
KLCIGNITNKKG

SEQ ID NO: 4389 - protein, 14 aa, Homo sapiens
  Table 3 sequence identifier: Q00653_C738
  MOD_RES (10)..(10): May or may not be conjugated to a chemical probe
RGHTPLDLTCSTKV

SEQ ID NO: 4390 - protein, 19 aa, Homo sapiens
  Table 3 sequence identifier: Q86W56_C603
  MOD_RES (5)..(5): May or may not be conjugated to a chemical probe
KIALCLPNICTQPIPLLKQ

SEQ ID NO: 4391 - protein, 23 aa, Homo sapiens
  Table 3 sequence identifier: P39748_C182
  MOD_RES (12)..(12): May or may not be conjugated to a chemical probe
KVYAAATEDMDCLTFGSPVLMRH

SEQ ID NO: 4392 - protein, 17 aa, Homo sapiens
  Table 3 sequence identifier: Q9Y3Z3_C320
  MOD_RES (3)..(3): May or may not be conjugated to a chemical probe
RDCHHLGIQNNFDYKRF

SEQ ID NO: 4393 - protein, 12 aa, Homo sapiens
  Table 3 sequence identifier: Q13045_C1265
  MOD_RES (10)..(10): May or may not be conjugated to a chemical probe
RCFHAWSAFCKA

SEQ ID NO: 4394 - protein, 17 aa, Homo sapiens
  Table 3 sequence identifier: Q14558_C19
  MOD_RES (11)..(11): May or may not be conjugated to a chemical probe
RVFSANSTAACTELAKR

SEQ ID NO: 4395 - protein, 20 aa, Homo sapiens
  Table 3 sequence identifier: O75592_C3152
  MOD_RES (15)..(15): May or may not be conjugated to a chemical probe
KAASQNMIFPSPGSCAVLKK

SEQ ID NO: 4396 - protein, 24 aa, Homo sapiens
  Table 3 sequence identifier: Q8IUR0_C40
  MOD_RES (20)..(20): May or may not be conjugated to a chemical probe
RTEVSLSAFALLFSELVQHCQSRV

SEQ ID NO: 4397 - protein, 10 aa, Homo sapiens
  Table 3 sequence identifier: Q16822_C92
  MOD_RES (5)..(5): May or may not be conjugated to a chemical probe
KYNNCWLART

SEQ ID NO: 4398 - protein, 20 aa, Homo sapiens
  Table 3 sequence identifier: Q53H96_C129
  MOD_RES (8)..(8): May or may not be conjugated to a chemical probe
RVLPNLPCVVQEGAIVMARG

SEQ ID NO: 4399 - protein, 25 aa, Homo sapiens
  Table 3 sequence identifier: Q96F24_C126
  MOD_RES (2)..(2): May or may not be conjugated to a chemical probe
KCLPEIQGIFDRDPDTLLYLLQQKS

SEQ ID NO: 4400 - protein, 27 aa, Homo sapiens
  Table 3 sequence identifier: H3BQ06_C89
  MOD_RES (6)..(6): May or may not be conjugated to a chemical probe
KHSSSCLPLPEFVDNTQVPSYCLNARG

SEQ ID NO: 4401 - protein, 10 aa, Homo sapiens
  Table 3 sequence identifier: Q06546_C421
  MOD_RES (6)..(6): May or may not be conjugated to a chemical probe
RLVTECEQKK

SEQ ID NO: 4402 - protein, 24 aa, Homo sapiens
  Table 3 sequence identifier: P56192_C309
  MOD_RES (11)..(11): May or may not be conjugated to a chemical probe
RLRQWNTLYLCGTDEYGTATETKA

SEQ ID NO: 4403 - protein, 36 aa, Homo sapiens
  Table 3 sequence identifier: Q9Y485_C1419
  MOD_RES (29)..(29): May or may not be conjugated to a chemical probe
KAENTDYTEIDSVPPLPLYALLAADDDSCYSSLEKS

SEQ ID NO: 4404 - protein, 38 aa, Homo sapiens
  Table 3 sequence identifier: Q00839_C408
  MOD_RES (22)..(22): May or may not be conjugated to a chemical probe
KTCNCETEDYGEKFDENDVITCFANFESDEVELSYAKN

SEQ ID NO: 4405 - protein, 11 aa, Homo sapiens
  Table 3 sequence identifier: Q92499_C631
  MOD_RES (7)..(7): May or may not be conjugated to a chemical probe
KVWYHVCSSRG

SEQ ID NO: 4406 - protein, 19 aa, Homo sapiens
  Table 3 sequence identifier: O43663_C531
  MOD_RES (15)..(15): May or may not be conjugated to a chemical probe
RLPPSGSKPVAASTCSGKK

SEQ ID NO: 4407 - protein, 11 aa, Homo sapiens
  Table 3 sequence identifier: O14879_C239
  MOD_RES (4)..(4): May or may not be conjugated to a chemical probe
KSPCQTDVLRS

SEQ ID NO: 4408 - protein, 15 aa, Homo sapiens
  Table 3 sequence identifier: P36969_C134
  MOD_RES (3)..(3): May or may not be conjugated to a chemical probe
KICVNGDDAHPLWKW

SEQ ID NO: 4409 - protein, 13 aa, Homo sapiens
  Table 3 sequence identifier: P12081_C235
  MOD_RES (4)..(4): May or may not be conjugated to a chemical probe
RTICSSVDKLDKV

SEQ ID NO: 4410 - protein, 12 aa, Homo sapiens
  Table 3 sequence identifier: P50914_C54
  MOD_RES (2)..(2): May or may not be conjugated to a chemical probe
KCMQLTDFILKF

SEQ ID NO: 4411 - protein, 16 aa, Homo sapiens
  Table 3 sequence identifier: Q9H0D6_C547
  MOD_RES (11)..(11): May or may not be conjugated to a chemical probe
KVVQSYVEGLCWVLRY

SEQ ID NO: 4412 - protein, 21 aa, Homo sapiens
  Table 3 sequence identifier: Q14C86_C1129
  MOD_RES (5)..(5): May or may not be conjugated to a chemical probe
RLALCSADSVAFPVLTHSTRN

SEQ ID NO: 4413 - protein, 30 aa, Homo sapiens
  Table 3 sequence identifier: Q9BXF6_C106
  MOD_RES (20)..(20): May or may not be conjugated to a chemical probe
RAQEADAGPAPWAASSAAACELVLTTMHRS

SEQ ID NO: 4414 - protein, 12 aa, Homo sapiens
  Table 3 sequence identifier: A6NHR9_C1856
  MOD_RES (5)..(5): May or may not be conjugated to a chemical probe
KITHCPTLLTRD

SEQ ID NO: 4415 - protein, 22 aa, Homo sapiens
  Table 3 sequence identifier: Q9BW92_C322
  MOD_RES (16)..(16): May or may not be conjugated to a chemical probe
KEQELFFFHELSPGSCFFLPRG

SEQ ID NO: 4416 - protein, 14 aa, Homo sapiens
  Table 3 sequence identifier: P83916_C156
  MOD_RES (2)..(2): May or may not be conjugated to a chemical probe
KCPQVVISFYEERL

SEQ ID NO: 4417 - protein, 28 aa, Homo sapiens
  Table 3 sequence identifier: O00410_C229
  MOD_RES (18)..(18): May or may not be conjugated to a chemical probe
KHFADLLPGFLQAVNDSCYQNDDSVLKS

SEQ ID NO: 4418 - protein, 15 aa, Homo sapiens
  Table 3 sequence identifier: Q5VUA4_C1681
  MOD_RES (3)..(3): May or may not be conjugated to a chemical probe
RLCQSRPYETITPKT

SEQ ID NO: 4419 - protein, 23 aa, Homo sapiens
  Table 3 sequence identifier: Q96SY0_C193
  MOD_RES (20)..(20): May or may not be conjugated to a chemical probe
RLIDLNNGEGQIFTIDGPLCLKN

SEQ ID NO: 4420 - protein, 12 aa, Homo sapiens
  Table 3 sequence identifier: Q9NS18_C77
  MOD_RES (4)..(4): May or may not be conjugated to a chemical probe
KTSCSYCTMAKK

SEQ ID NO: 4421 - protein, 20 aa, Homo sapiens
  Table 3 sequence identifier: P46109_C44
  MOD_RES (6)..(6): May or may not be conjugated to a chemical probe
RDSSTCPGDYVLSVSENSRV

SEQ ID NO: 4422 - protein, 18 aa, Homo sapiens
  Table 3 sequence identifier: Q14289_C677
  MOD_RES (7)..(7): May or may not be conjugated to a chemical probe
RFTELVCSLSDVYQMEKD

SEQ ID NO: 4423 - protein, 18 aa, Homo sapiens
  Table 3 sequence identifier: Q14289_C972
  MOD_RES (15)..(15): May or may not be conjugated to a chemical probe
RLAQQNAVTSLSEECKRQ

SEQ ID NO: 4424 - protein, 19 aa, Homo sapiens
  Table 3 sequence identifier: O75718_C317
  MOD_RES (6)..(6): May or may not be conjugated to a chemical probe
KNAAPCAVSYLLFDQNDKV

SEQ ID NO: 4425 - protein, 36 aa, Homo sapiens
  Table 3 sequence identifier: Q86Y37_C94
  MOD_RES (27)..(27): May or may not be conjugated to a chemical probe
KGPKEGLPMGPQPPPEANGVIMMLKSCDAAAAVAKA

SEQ ID NO: 4426 - protein, 24 aa, Homo sapiens
  Table 3 sequence identifier: P16144_C1553
  MOD_RES (2)..(2): May or may not be conjugated to a chemical probe
RCERPLQGYSVEYQLLNGGELHRL

SEQ ID NO: 4427 - protein, 12 aa, Homo sapiens
  Table 3 sequence identifier: Q9BY42_C51
  MOD_RES (7)..(7): May or may not be conjugated to a chemical probe
RRPIVACELGRL

SEQ ID NO: 4428 - protein, 14 aa, Homo sapiens
  Table 3 sequence identifier: Q8ND56_C375
  MOD_RES (9)..(9): May or may not be conjugated to a chemical probe
KSFFDNISCDDNRE

SEQ ID NO: 4429 - protein, 30 aa, Homo sapiens
  Table 3 sequence identifier: P40121_C165
  MOD_RES (13)..(13): May or may not be conjugated to a chemical probe
RALNWDSFNTGDCFILDLGQNIFAWCGGKS

SEQ ID NO: 4430 - protein, 10 aa, Homo sapiens
  Table 3 sequence identifier: P78347_C745
  MOD_RES (2)..(2): May or may not be conjugated to a chemical probe
KCGEALGLKQ

SEQ ID NO: 4431 - protein, 22 aa, Homo sapiens
  Table 3 sequence identifier: P78347_C903
  MOD_RES (8)..(8): May or may not be conjugated to a chemical probe
KITINPGCVVVDGMPPGVSFKA

SEQ ID NO: 4432 - protein, 11 aa, Homo sapiens
  Table 3 sequence identifier: P16885_C496
  MOD_RES (4)..(4): May or may not be conjugated to a chemical probe
RHYCAIADAKL

SEQ ID NO: 4433 - protein, 28 aa, Homo sapiens
  Table 3 sequence identifier: Q9H814_C87
  MOD_RES (2)..(2): May or may not be conjugated to a chemical probe
KCFNPPPKPEPFQFGQSSQKPPVAGGKK

SEQ ID NO: 4434 - protein, 36 aa, Homo sapiens
  Table 3 sequence identifier: P29401_C41
  MOD_RES (19)..(19): May or may not be conjugated to a chemical probe
RISSIQATTAAGSGHPTSCCSAAEIMAVLFFHTMRY

SEQ ID NO: 4435 - protein, 12 aa, Homo sapiens
  Table 3 sequence identifier: P35249_C141
  MOD_RES (7)..(7): May or may not be conjugated to a chemical probe
RSDGKPCPPFKI

SEQ ID NO: 4436 - protein, 29 aa, Homo sapiens
  Table 3 sequence identifier: Q92835_C956
  MOD_RES (27)..(27): May or may not be conjugated to a chemical probe
KQTLSPDQQPTAWSYDQPPKDSPLGPCRG

SEQ ID NO: 4437 - protein, 21 aa, Homo sapiens
  Table 3 sequence identifier: Q9Y6E0_C375
  MOD_RES (7)..(7): May or may not be conjugated to a chemical probe
KRPFSQCLSTIISPLFAELKE

SEQ ID NO: 4438 - protein, 17 aa, Homo sapiens
  Table 3 sequence identifier: O75380_C87
  MOD_RES (5)..(5): May or may not be conjugated to a chemical probe
RVIACDGGGGALGHPKV

SEQ ID NO: 4439 - protein, 9 aa, Homo sapiens
  Table 3 sequence identifier: Q9Y4G6_C1954
  MOD_RES (6)..(6): May or may not be conjugated to a chemical probe
RELIECARA

SEQ ID NO: 4440 - protein, 23 aa, Homo sapiens
  Table 3 sequence identifier: Q9NYG5_C7
  MOD_RES (2)..(2): May or may not be conjugated to a chemical probe
KCWNGVATWLWVANDENCGICRM

SEQ ID NO: 4441 - protein, 12 aa, Homo sapiens
  Table 3 sequence identifier: Q9UPN3_C5131
  MOD_RES (10)..(10): May or may not be conjugated to a chemical probe
KLEGIGQFHCRV

SEQ ID NO: 4442 - protein, 21 aa, Homo sapiens
  Table 3 sequence identifier: P53634_C448
  MOD_RES (6)..(6): May or may not be conjugated to a chemical probe
RGTDECAIESIAVAATPIPKL

SEQ ID NO: 4443 - protein, 30 aa, Homo sapiens
  Table 3 sequence identifier: Q96HA7_C830
  MOD_RES (15)..(15): May or may not be conjugated to a chemical probe
KALAPQAALIPEEECLAGDWLELDMPLTRS

SEQ ID NO: 4444 - protein, 46 aa, Homo sapiens
  Table 3 sequence identifier: A5YKK6_C677
  MOD_RES (39)..(39): May or may not be conjugated to a chemical probe
KSAQLPPETLATMLACLQACAGSVSQELSETILTMVANCSNVMNKA

SEQ ID NO: 4445 - protein, 29 aa, Homo sapiens
  Table 3 sequence identifier: Q9BWU0_C125
  MOD_RES (24)..(24): May or may not be conjugated to a chemical probe
KEGPTALQDSNSGEPDIPPPQPDCGDFRS

SEQ ID NO: 4446 - protein, 14 aa, Homo sapiens
  Table 3 sequence identifier: Q9BWU0_C730
  MOD_RES (6)..(6): May or may not be conjugated to a chemical probe
KTTSLCAGPSASKN

SEQ ID NO: 4447 - protein, 22 aa, Homo sapiens
  Table 3 sequence identifier: P40763_C718
  MOD_RES (10)..(10): May or may not be conjugated to a chemical probe
KFICVTPTTCSNTIDLPMSPRT

SEQ ID NO: 4448 - protein, 25 aa, Homo sapiens
  Table 3 sequence identifier: Q96RU3_C555
  MOD_RES (23)..(23): May or may not be conjugated to a chemical probe
KVLATDFDDEFDDEEPLPAIGTCKA

SEQ ID NO: 4449 - protein, 9 aa, Homo sapiens
  Table 3 sequence identifier: Q96HS1_C168
  MOD_RES (7)..(7): May or may not be conjugated to a chemical probe
RHLPGVCKV

SEQ ID NO: 4450 - protein, 10 aa, Homo sapiens
  Table 3 sequence identifier: Q6YN16_C136
  MOD_RES (3)..(3): May or may not be conjugated to a chemical probe
KACIPYLKKS

SEQ ID NO: 4451 - protein, 35 aa, Homo sapiens
  Table 3 sequence identifier: P05067_C98
  MOD_RES (33)..(33): May or may not be conjugated to a chemical probe
KEGILQYCQEVYPELQITNVVEANQPVTIQNWCKR

SEQ ID NO: 4452 - protein, 28 aa, Homo sapiens
  Table 3 sequence identifier: Q96RE7_C85
  MOD_RES (23)..(23): May or may not be conjugated to a chemical probe
RSAVVELPAAVQPQSFQQILSFCYTGRL

SEQ ID NO: 4453 - protein, 14 aa, Homo sapiens
  Table 3 sequence identifier: P49959_C336
  MOD_RES (10)..(10): May or may not be conjugated to a chemical probe
KVTQAIQSFCLEKI

SEQ ID NO: 4454 - protein, 38 aa, Homo sapiens
  Table 3 sequence identifier: Q01813_C232
  MOD_RES (14)..(14): May or may not be conjugated to a chemical probe
RHCGYLALVSALACGADWVFLPESPPEEGWEEQMCVKL

SEQ ID NO: 4455 - protein, 17 aa, Homo sapiens
  Table 3 sequence identifier: P49792_C348
  MOD_RES (14)..(14): May or may not be conjugated to a chemical probe
KGEAGQNLLEMMACDRL

SEQ ID NO: 4456 - protein, 13 aa, Homo sapiens
  Table 3 sequence identifier: P49792_C1296
  MOD_RES (2)..(2): May or may not be conjugated to a chemical probe
KCKFEEAQSILKA

SEQ ID NO: 4457 - protein, 24 aa, Homo sapiens
  Table 3 sequence identifier: Q93008_C1566
  MOD_RES (7)..(7): May or may not be conjugated to a chemical probe
KNAGATCYMNSVIQQLYMIPSIRN

SEQ ID NO: 4458 - protein, 11 aa, Homo sapiens
  Table 3 sequence identifier: Q9BY89_C817
  MOD_RES (6)..(6): May or may not be conjugated to a chemical probe
KFGGNCPFPKW

SEQ ID NO: 4459 - protein, 28 aa, Homo sapiens
  Table 3 sequence identifier: Q5SRE5_C1445
  MOD_RES (8)..(8): May or may not be conjugated to a chemical probe
RTVQSLACLEEADHTVGFILQLSNFMKE

SEQ ID NO: 4460 - protein, 14 aa, Homo sapiens
  Table 3 sequence identifier: Q92665_C356
  MOD_RES (9)..(9): May or may not be conjugated to a chemical probe
RHFMELVTCGLSKN

SEQ ID NO: 4461 - protein, 25 aa, Homo sapiens
  Table 3 sequence identifier: P18669_C55
  MOD_RES (17)..(17): May or may not be conjugated to a chemical probe
KRGGQALRDAGYEFDICFTSVQKRA

SEQ ID NO: 4462 - protein, 29 aa, Homo sapiens
  Table 3 sequence identifier: Q9Y4P8_C70
  MOD_RES (17)..(17): May or may not be conjugated to a chemical probe
KFFSLSSVDKLEQIYECTDTEDVCIVERL

SEQ ID NO: 4463 - protein, 19 aa, Homo sapiens
  Table 3 sequence identifier: Q9Y4P1_C189
  MOD_RES (6)..(6): May or may not be conjugated to a chemical probe
RTSVPCAGATAFPADSDRH

SEQ ID NO: 4464 - protein, 25 aa, Homo sapiens
  Table 3 sequence identifier: Q9BZD4_C285
  MOD_RES (11)..(11): May or may not be conjugated to a chemical probe
KYEIYGDSVDCLPSCQLEVQLYQKK

SEQ ID NO: 4465 - protein, 24 aa, Homo sapiens
  Table 3 sequence identifier: Q01581_C406
  MOD_RES (20)..(20): May or may not be conjugated to a chemical probe
KVTQDATPGSALDKITASLCDLKS

SEQ ID NO: 4466 - protein, 36 aa, Homo sapiens
  Table 3 sequence identifier: P78344_C677
  MOD_RES (29)..(29): May or may not be conjugated to a chemical probe
RAIISELVSISELAQPLESGTHFPLFLLCLQQLAKL

SEQ ID NO: 4467 - protein, 49 aa, Homo sapiens
  Table 3 sequence identifier: Q92609_C753
  MOD_RES (7)..(7): May or may not be conjugated to a chemical probe
KSQAPVCSPLVFSDPLMGPASASSSNPSSSPDDDSSKDSGFTIVSPLDI

SEQ ID NO: 4468 - protein, 29 aa, Homo sapiens
  Table 3 sequence identifier: Q9BSJ8_C890
  MOD_RES (25)..(25): May or may not be conjugated to a chemical probe
RGEGTGVLGSLSLPLSELLVADQLCLDRW

SEQ ID NO: 4469 - protein, 14 aa, Homo sapiens
  Table 3 sequence identifier: P46013_C226
  MOD_RES (8)..(8): May or may not be conjugated to a chemical probe
KSVPTTQCLDNSKK

SEQ ID NO: 4470 - protein, 20 aa, Homo sapiens
  Table 3 sequence identifier: P46013_C1373
  MOD_RES (4)..(4): May or may not be conjugated to a chemical probe
KMPCESSPPESADTPTSTRR

SEQ ID NO: 4471 - protein, 19 aa, Homo sapiens
  Table 3 sequence identifier: P46013_C1479
  MOD_RES (9)..(9): May or may not be conjugated to a chemical probe
KELFQTPVCTDKPTTHEKT

SEQ ID NO: 4472 - protein, 17 aa, Homo sapiens
  Table 3 sequence identifier: P17858_C708
  MOD_RES (11)..(11): May or may not be conjugated to a chemical probe
RVFANAPDSACVIGLKK

SEQ ID NO: 4473 - protein, 35 aa, Homo sapiens
  Table 3 sequence identifier: Q96PK6_C31
  MOD_RES (30)..(30): May or may not be conjugated to a chemical probe
KIFVGNVDGADTTPEELAALFAPYGTVMSCAVMKQ

SEQ ID NO: 4474 - protein, 33 aa, Homo sapiens
  Table 3 sequence identifier: P53602_C133
  MOD_RES (25)..(25): May or may not be conjugated to a chemical probe
KVHVASVNNFPTAAGLASSAAGYACLAYTLARV

SEQ ID NO: 4475 - protein, 20 aa, Homo sapiens
  Table 3 sequence identifier: Q8WXH0_C1032
  MOD_RES (2)..(2): May or may not be conjugated to a chemical probe
KCASEIHMTLQPTAGGTSKN

SEQ ID NO: 4476 - protein, 16 aa, Homo sapiens
  Table 3 sequence identifier: Q14137_C108
  MOD_RES (13)..(13): May or may not be conjugated to a chemical probe
KTTEEQVQASTPCPRT

SEQ ID NO: 4477 - protein, 28 aa, Homo sapiens
  Table 3 sequence identifier: P23368_C481
  MOD_RES (24)..(24): May or may not be conjugated to a chemical probe
RVFTPGQGNNVYIFPGVALAVILCNTRH

SEQ ID NO: 4478 - protein, 15 aa, Homo sapiens
  Table 3 sequence identifier: P51692_C688
  MOD_RES (8)..(8): May or may not be conjugated to a chemical probe
KYYTPVPCESATAKA

SEQ ID NO: 4479 - protein, 22 aa, Homo sapiens
  Table 3 sequence identifier: Q8TD19_C890
  MOD_RES (10)..(10): May or may not be conjugated to a chemical probe
KGTPLTPPACACSSLQVEVERL

SEQ ID NO: 4480 - protein, 25 aa, Homo sapiens
  Table 3 sequence identifier: Q14008_C1113
  MOD_RES (12)..(12): May or may not be conjugated to a chemical probe
KFQPASAPAEDCISSSTEPKPDPKK

SEQ ID NO: 4481 - protein, 9 aa, Homo sapiens
  Table 3 sequence identifier: Q14008_C1946
  MOD_RES (2)..(2): May or may not be conjugated to a chemical probe
RCGLDNTKQ

SEQ ID NO: 4482 - protein, 9 aa, Homo sapiens
  Table 3 sequence identifier: Q9UJU6_C67
  MOD_RES (7)..(7): May or may not be conjugated to a chemical probe
KVMYAFCRV

SEQ ID NO: 4483 - protein, 14 aa, Homo sapiens
  Table 3 sequence identifier: Q9UPQ0_C182
  MOD_RES (8)..(8): May or may not be conjugated to a chemical probe
RDSGYIDCWDSERS

SEQ ID NO: 4484 - protein, 17 aa, Homo sapiens
  Table 3 sequence identifier: Q15424_C362
  MOD_RES (8)..(8): May or may not be conjugated to a chemical probe
RKFDFDACNEVPPAPKE

SEQ ID NO: 4485 - protein, 27 aa, Homo sapiens
  Table 3 sequence identifier: O95757_C290
  MOD_RES (16)..(16): May or may not be conjugated to a chemical probe
KLMSANASDLPLNIECFMNDLDVSSKM

SEQ ID NO: 4486 - protein, 16 aa, Homo sapiens
  Table 3 sequence identifier: P21333_C623
  MOD_RES (4)..(4): May or may not be conjugated to a chemical probe
KIECDDKGDGSCDVRY

SEQ ID NO: 4487 - protein, 13 aa, Homo sapiens
  Table 3 sequence identifier: P51610_C326
  MOD_RES (5)..(5): May or may not be conjugated to a chemical probe
RAGHCAVAINTRL

SEQ ID NO: 4488 - protein, 29 aa, Homo sapiens
  Table 3 sequence identifier: Q9H6E5_C501
  MOD_RES (21)..(21): May or may not be conjugated to a chemical probe
RLEPSINVEPLSSLLAQFFSCVSCWDLRG

SEQ ID NO: 4489 - protein, 9 aa, Homo sapiens
  Table 3 sequence identifier: O00154_C100
  MOD_RES (2)..(2): May or may not be conjugated to a chemical probe
RCVAALARV

SEQ ID NO: 4490 - protein, 8 aa, Homo sapiens
  Table 3 sequence identifier: O95347_C800
  MOD_RES (5)..(5): May or may not be conjugated to a chemical probe
KKLDCAKT

SEQ ID NO: 4491 - protein, 13 aa, Homo sapiens
  Table 3 sequence identifier: Q96SZ5_C239
  MOD_RES (8)..(8): May or may not be conjugated to a chemical probe
KEASSSACDLPRE

SEQ ID NO: 4492 - protein, 11 aa, Homo sapiens
  Table 3 sequence identifier: P18615_C297
  MOD_RES (3)..(3): May or may not be conjugated to a chemical probe
RNCAFVTYEKM

SEQ ID NO: 4493 - protein, 24 aa, Homo sapiens
  Table 3 sequence identifier: Q93034_C112
  MOD_RES (14)..(14): May or may not be conjugated to a chemical probe
KFFTQCDILPKPFCQLEITLMGKQ

SEQ ID NO: 4494 - protein, 27 aa, Homo sapiens
  Table 3 sequence identifier: O43913_C171
  MOD_RES (8)..(8): May or may not be conjugated to a chemical probe
KFRPNTGCFEPFVLYFPDYSIGNLQKI

SEQ ID NO: 4495 - protein, 9 aa, Homo sapiens
  Table 3 sequence identifier: P01033_C189
  MOD_RES (5)..(5): May or may not be conjugated to a chemical probe
RHLACLPRE

SEQ ID NO: 4496 - protein, 30 aa, Homo sapiens
  Table 3 sequence identifier: Q92616_C1362
  MOD_RES (20)..(20): May or may not be conjugated to a chemical probe
KLIAALSTPSQQVQESVASCLPPLVPAIKE

SEQ ID NO: 4497 - protein, 33 aa, Homo sapiens
  Table 3 sequence identifier: Q92616_C1781
  MOD_RES (29)..(29): May or may not be conjugated to a chemical probe
RDGYIMMFNYLPITFGDKFTPYVGPIIPCILKA

SEQ ID NO: 4498 - protein, 25 aa, Homo sapiens
  Table 3 sequence identifier: Q99661_C154
  MOD_RES (15)..(15): May or may not be conjugated to a chemical probe
RKQFSVPPAPTRPSCPAVAEIPLRM

SEQ ID NO: 4499 - protein, 17 aa, Homo sapiens
  Table 3 sequence identifier: O60701_C196
  MOD_RES (7)..(7): May or may not be conjugated to a chemical probe
RAVQALCAVYEHWVPRE

SEQ ID NO: 4500 - protein, 15 aa, Homo sapiens
  Table 3 sequence identifier: Q9UH65_C279
  MOD_RES (2)..(2): May or may not be conjugated to a chemical probe
KCFDKTFEISASDKK

SEQ ID NO: 4501 - protein, 27 aa, Homo sapiens
  Table 3 sequence identifier: Q96FS4_C446
  MOD_RES (21)..(21): May or may not be conjugated to a chemical probe
RHIGNDIVTIVFQEPGSKPFCPTTIRS

SEQ ID NO: 4502 - protein, 9 aa, Homo sapiens
  Table 3 sequence identifier: P49327_C1186
  MOD_RES (7)..(7): May or may not be conjugated to a chemical probe
RLLSAACRL

SEQ ID NO: 4503 - protein, 9 aa, Homo sapiens
  Table 3 sequence identifier: P49327_C1759
  MOD_RES (2)..(2): May or may not be conjugated to a chemical probe
RCLATHGRF

SEQ ID NO: 4504 - protein, 21 aa, Homo sapiens
  Table 3 sequence identifier: P49327_C2292
  MOD_RES (18)..(18): May or may not be conjugated to a chemical probe
RAAPLDSIHSLAAYYIDCIRQ

SEQ ID NO: 4505 - protein, 12 aa, Homo sapiens
  Table 3 sequence identifier: Q05655_C280
  MOD_RES (6)..(6): May or may not be conjugated to a chemical probe
KVANLCGINQKL

SEQ ID NO: 4506 - protein, 12 aa, Homo sapiens
  Table 3 sequence identifier: Q05655_C344
  MOD_RES (2)..(2): May or may not be conjugated to a chemical probe
KCNINNFIFHKV

SEQ ID NO: 4507 - protein, 16 aa, Homo sapiens
  Table 3 sequence identifier: Q9BQE9_C189
  MOD_RES (3)..(3): May or may not be conjugated to a chemical probe
RFCVDQPTVPQTASES

SEQ ID NO: 4508 - protein, 29 aa, Homo sapiens
  Table 3 sequence identifier: Q8N1G0_C91
  MOD_RES (5)..(5): May or may not be conjugated to a chemical probe
KNTVCPEQSEALAGGSAGDGAQAAGVTKE

SEQ ID NO: 4509 - protein, 11 aa, Homo sapiens
  Table 3 sequence identifier: P13489_C45
  MOD_RES (2)..(2): May or may not be conjugated to a chemical probe
RCKDISSALRV

SEQ ID NO: 4510 - protein, 12 aa, Homo sapiens
  Table 3 sequence identifier: P48444_C479
  MOD_RES (5)..(5): May or may not be conjugated to a chemical probe
KKNYCNIQVTKV

SEQ ID NO: 4511 - protein, 12 aa, Homo sapiens
  Table 3 sequence identifier: Q96BN8_C129
  MOD_RES (8)..(8): May or may not be conjugated to a chemical probe
RVRGDNYCALRA

SEQ ID NO: 4512 - protein, 25 aa, Homo sapiens
  Table 3 sequence identifier: Q9UKU7_C159
  MOD_RES (6)..(6): May or may not be conjugated to a chemical probe
KFASYCLTEPGSGSDAASLLTSAKK

SEQ ID NO: 4513 - protein, 10 aa, Homo sapiens
  Table 3 sequence identifier: Q9H2L5_C249
  MOD_RES (7)..(7): May or may not be conjugated to a chemical probe
RILHGPCEKI

SEQ ID NO: 4514 - protein, 27 aa, Homo sapiens
  Table 3 sequence identifier: Q12888_C1178
  MOD_RES (4)..(4): May or may not be conjugated to a chemical probe
KNVCEQGTSTVDQNFGKQDATVQTERG

SEQ ID NO: 4515 - protein, 41 aa, Homo sapiens
  Table 3 sequence identifier: P29034_C94
  MOD_RES (37)..(37): May or may not be conjugated to a chemical probe
KLMGSLDENSDQQVDFQEYAVFLALITVMCNDFFQGCPDRP

SEQ ID NO: 4516 - protein, 12 aa, Homo sapiens
  Table 3 sequence identifier: Q9UQ35_C785
  MOD_RES (9)..(9): May or may not be conjugated to a chemical probe
RSLSGSSPCPKQ

SEQ ID NO: 4517 - protein, 32 aa, Homo sapiens
  Table 3 sequence identifier: O00329_C474
  MOD_RES (15)..(15): May or may not be conjugated to a chemical probe
RSNPNTDSAAALLICLPEVAPHPVYYPALEKI

SEQ ID NO: 4518 - protein, 17 aa, Homo sapiens
  Table 3 sequence identifier: Q9Y2Y0_C149
  MOD_RES (15)..(15): May or may not be conjugated to a chemical probe
RGLDLSSGLVVTSLCKS

SEQ ID NO: 4519 - protein, 11 aa, Homo sapiens
  Table 3 sequence identifier: O15357_C1121
  MOD_RES (3)..(3): May or may not be conjugated to a chemical probe
RSCSVLQMAKT

SEQ ID NO: 4520 - protein, 15 aa, Homo sapiens
  Table 3 sequence identifier: Q99832_C345
  MOD_RES (2)..(2): May or may not be conjugated to a chemical probe
RCQVFEETQIGGERY

SEQ ID NO: 4521 - protein, 29 aa, Homo sapiens
  Table 3 sequence identifier: Q9Y4D8_C1370
  MOD_RES (5)..(5): May or may not be conjugated to a chemical probe
RATECCGNQAAGNDALQDVLSLLNDLSRS

SEQ ID NO: 4522 - protein, 46 aa, Homo sapiens
  Table 3 sequence identifier: Q6KC79_C419
  MOD_RES (18)..(18): May or may not be conjugated to a chemical probe
KTPITPQDINRPLNAAQCLSQQEQTAFLPANQVPVLQQNTSVAAKQ

SEQ ID NO: 4523 - protein, 40 aa, Homo sapiens
  Table 3 sequence identifier: P04179_C164
  MOD_RES (9)..(9): May or may not be conjugated to a chemical probe
RGHLQIAACPNQDPLQGTTGLIPLLGIDVWEHAYYLQYKN

SEQ ID NO: 4524 - protein, 27 aa, Homo sapiens
  Table 3 sequence identifier: Q96RG2_C15
  MOD_RES (2)..(2): May or may not be conjugated to a chemical probe
RCLSQSLPLPVSAEGPAAQTTAEPSRS

SEQ ID NO: 4525 - protein, 15 aa, Homo sapiens
  Table 3 sequence identifier: Q14061_C24
  MOD_RES (8)..(8): May or may not be conjugated to a chemical probe
KKPLKPCCACPETKK

SEQ ID NO: 4526 - protein, 14 aa, Homo sapiens
  Table 3 sequence identifier: Q96DC7_C14
  MOD_RES (7)..(7): May or may not be conjugated to a chemical probe
RLRPTVCGVEELRR

SEQ ID NO: 4527 - protein, 30 aa, Homo sapiens
  Table 3 sequence identifier: P20248_C327
  MOD_RES (28)..(28): May or may not be conjugated to a chemical probe
KVLTFDLAAPTVNQFLTQYFLHQQPANCKV

SEQ ID NO: 4528 - protein, 9 aa, Homo sapiens
  Table 3 sequence identifier: Q02878_C44
  MOD_RES (6)..(6): May or may not be conjugated to a chemical probe
KGKPHCSRN

SEQ ID NO: 4529 - protein, 23 aa, Homo sapiens
  Table 3 sequence identifier: O14773_C365
  MOD_RES (16)..(16): May or may not be conjugated to a chemical probe
RGLTLLFASGDSGAGCWSVSGRH

SEQ ID NO: 4530 - protein, 21 aa, Homo sapiens
  Table 3 sequence identifier: P61086_C92
  MOD_RES (15)..(15): May or may not be conjugated to a chemical probe
KIWHPNISSVTGAICLDILKD

SEQ ID NO: 4531 - protein, 14 aa, Homo sapiens
  Table 3 sequence identifier: P31146_C332
  MOD_RES (9)..(9): May or may not be conjugated to a chemical probe
KRGLEVNKCEIARF

SEQ ID NO: 4532 - protein, 27 aa, Homo sapiens
  Table 3 sequence identifier: Q9BR76_C153
  MOD_RES (9)..(9): May or may not be conjugated to a chemical probe
RNVLLSAGCDNVVLIWNVGTAEELYRL

SEQ ID NO: 4533 - protein, 9 aa, Homo sapiens
  Table 3 sequence identifier: Q96QC0_C463
  MOD_RES (6)..(6): May or may not be conjugated to a chemical probe
KVPWVCPRP

SEQ ID NO: 4534 - protein, 17 aa, Homo sapiens
  Table 3 sequence identifier: Q5VT52_C1071
  MOD_RES (6)..(6): May or may not be conjugated to a chemical probe
RVSSSCLDLPDSTEEKG

SEQ ID NO: 4535 - protein, 12 aa, Homo sapiens
  Table 3 sequence identifier: P78527_C373
  MOD_RES (10)..(10): May or may not be conjugated to a chemical probe
RGYGLFAGPCKV

SEQ ID NO: 4536 - protein, 29 aa, Homo sapiens
  Table 3 sequence identifier: Q96A35_C58
  MOD_RES (18)..(18): May or may not be conjugated to a chemical probe
RRPVVVEPISDEDWYLFCGDTVEILEGKD

SEQ ID NO: 4537 - protein, 16 aa, Homo sapiens
  Table 3 sequence identifier: Q14498_C303
  MOD_RES (13)..(13): May or may not be conjugated to a chemical probe
KGYGFITFSDSECAKK

SEQ ID NO: 4538 - protein, 9 aa, Homo sapiens
  Table 3 sequence identifier: Q8N556_C157
  MOD_RES (3)..(3): May or may not be conjugated to a chemical probe
KICAFLLRK

SEQ ID NO: 4539 - protein, 11 aa, Homo sapiens
  Table 3 sequence identifier: Q68CP9_C711
  MOD_RES (6)..(6): May or may not be conjugated to a chemical probe
KAPIPCEVVKA

SEQ ID NO: 4540 - protein, 13 aa, Homo sapiens
  Table 3 sequence identifier: Q9H3U1_C663
  MOD_RES (11)..(11): May or may not be conjugated to a chemical probe
KTESPVLTSSCRE

SEQ ID NO: 4541 - protein, 8 aa, Homo sapiens
  Table 3 sequence identifier: Q99567_C595
  MOD_RES (4)..(4): May or may not be conjugated to a chemical probe
KLLCDQKK

SEQ ID NO: 4542 - protein, 16 aa, Homo sapiens
  Table 3 sequence identifier: Q14789_C1713
  MOD_RES (3)..(3): May or may not be conjugated to a chemical probe
KECMETLLSSNASMKE

SEQ ID NO: 4543 - protein, 38 aa, Homo sapiens
  Table 3 sequence identifier: P20810_C661
  MOD_RES (25)..(25): May or may not be conjugated to a chemical probe
KSEDSKKPADDQDPIDALSGDLDSCPSTTETSQNTAKD

SEQ ID NO: 4544 - protein, 18 aa, Homo sapiens
  Table 3 sequence identifier: P07203_C115
  MOD_RES (2)..(2): May or may not be conjugated to a chemical probe
KCEVNGAGAHPLFAFLRE

SEQ ID NO: 4545 - protein, 21 aa, Homo sapiens
  Table 3 sequence identifier: O60216_C35
  MOD_RES (7)..(7): May or may not be conjugated to a chemical probe
KAHVFECNLESSVESIISPKV

SEQ ID NO: 4546 - protein, 50 aa, Homo sapiens
  Table 3 sequence identifier: O60216_C513
  MOD_RES (35)..(35): May or may not be conjugated to a chemical probe
KAGQIDPEPVMPPQQVEQMEIPPVELPPEEPPNICQLIPELELLPEKEKE

SEQ ID NO: 4547 - protein, 12 aa, Homo sapiens
  Table 3 sequence identifier: Q9ULV4_C190
  MOD_RES (7)..(7): May or may not be conjugated to a chemical probe
RNGSLICTASKD

SEQ ID NO: 4548 - protein, 13 aa, Homo sapiens
  Table 3 sequence identifier: P30153_C174
  MOD_RES (4)..(4): May or may not be conjugated to a chemical probe
RNLCSDDTPMVRR

SEQ ID NO: 4549 - protein, 15 aa, Homo sapiens
  Table 3 sequence identifier: P30153_C329
  MOD_RES (12)..(12): May or may not be conjugated to a chemical probe
RENVIMSQILPCIKE

SEQ ID NO: 4550 - protein, 12 aa, Homo sapiens
  Table 3 sequence identifier: Q9UEW8_C99
  MOD_RES (2)..(2): May or may not be conjugated to a chemical probe
KCQTSMDELLKE

SEQ ID NO: 4551 - protein, 24 aa, Homo sapiens
  Table 3 sequence identifier: Q13574_C265
  MOD_RES (18)..(18): May or may not be conjugated to a chemical probe
KSGLQHLAPPPPTPGAPCSESERQ

SEQ ID NO: 4552 - protein, 13 aa, Homo sapiens
  Table 3 sequence identifier: O00233_C216
  MOD_RES (6)..(6): May or may not be conjugated to a chemical probe
KGLLGCNIIPLQR

SEQ ID NO: 4553 - protein, 11 aa, Homo sapiens
  Table 3 sequence identifier: P05023_C705
  MOD_RES (8)..(8): May or may not be conjugated to a chemical probe
KLIIVEGCQRQ

SEQ ID NO: 4554 - protein, 14 aa, Homo sapiens
  Table 3 sequence identifier: P45985_C266
  MOD_RES (5)..(5): May or may not be conjugated to a chemical probe
RDAGCRPYMAPERI

SEQ ID NO: 4555 - protein, 16 aa, Homo sapiens
  Table 3 sequence identifier: P45983_C245
  MOD_RES (10)..(10): May or may not be conjugated to a chemical probe
KVIEQLGTPCPEFMKK

SEQ ID NO: 4556 - protein, 32 aa, Homo sapiens
  Table 3 sequence identifier: Q9P2R7_C320
  MOD_RES (15)..(15): May or may not be conjugated to a chemical probe
KANLNYIGLDGNIGCLVNGAGLAMATMDIIKL

SEQ ID NO: 4557 - protein, 19 aa, Homo sapiens
  Table 3 sequence identifier: P31040_C89
  MOD_RES (15)..(15): May or may not be conjugated to a chemical probe
RAAFGLSEAGFNTACVTKL

SEQ ID NO: 4558 - protein, 22 aa, Homo sapiens
  Table 3 sequence identifier: O76071_C234
  MOD_RES (13)..(13): May or may not be conjugated to a chemical probe
RQYLPGNEQGVACSGSDPSWKC

SEQ ID NO: 4559 - protein, 10 aa, Homo sapiens
  Table 3 sequence identifier: O95372_C56
  MOD_RES (4)..(4): May or may not be conjugated to a chemical probe
KYICPHAPRI

SEQ ID NO: 4560 - protein, 20 aa, Homo sapiens
  Table 3 sequence identifier: Q04864_C524
  MOD_RES (12)..(12): May or may not be conjugated to a chemical probe
RLLSMNLENPSCNSVLDPRD

SEQ ID NO: 4561 - protein, 22 aa, Homo sapiens
  Table 3 sequence identifier: Q96CD2_C173
  MOD_RES (4)..(4): May or may not be conjugated to a chemical probe
KLVCGDEGLGAMAEVGTIVDKV

SEQ ID NO: 4562 - protein, 14 aa, Homo sapiens
  Table 3 sequence identifier: A6NC98_C1222
  MOD_RES (12)..(12): May or may not be conjugated to a chemical probe
RESNQQLDLSACRL

SEQ ID NO: 4563 - protein, 15 aa, Homo sapiens
  Table 3 sequence identifier: Q10570_C1020
  MOD_RES (2)..(2): May or may not be conjugated to a chemical probe
RCTAHYVAYHVESKV

SEQ ID NO: 4564 - protein, 22 aa, Homo sapiens
  Table 3 sequence identifier: P43378_C506
  MOD_RES (6)..(6): May or may not be conjugated to a chemical probe
RSKGQCPEPPIVVHCSAGIGRT

SEQ ID NO: 4565 - protein, 17 aa, Homo sapiens
  Table 3 sequence identifier: Q15021_C816
  MOD_RES (7)..(7): May or may not be conjugated to a chemical probe
RLAQQVCHAIANISDRR

SEQ ID NO: 4566 - protein, 9 aa, Homo sapiens
  Table 3 sequence identifier: Q8TEW0_C6
  MOD_RES (5)..(5): May or may not be conjugated to a chemical probe
KVTVCFGRT

SEQ ID NO: 4567 - protein, 28 aa, Homo sapiens
  Table 3 sequence identifier: O94925_C500
  MOD_RES (20)..(20): May or may not be conjugated to a chemical probe
KSGVAGGILLVVPNVMGMMCWSPPLDKM

SEQ ID NO: 4568 - protein, 22 aa, Homo sapiens
  Table 3 sequence identifier: Q9Y3B8_C137
  MOD_RES (9)..(9): May or may not be conjugated to a chemical probe
RQQTPPGLCPLAGNSVHEDKKF

SEQ ID NO: 4569 - protein, 17 aa, Homo sapiens
  Table 3 sequence identifier: Q96LD4_C347
  MOD_RES (8)..(8): May or may not be conjugated to a chemical probe
RLALEDGCGPGPGPPRE

SEQ ID NO: 4570 - protein, 18 aa, Homo sapiens
  Table 3 sequence identifier: Q9H081_C104
  MOD_RES (2)..(2): May or may not be conjugated to a chemical probe
KCKETPYSEEDFQHLQKE

SEQ ID NO: 4571 - protein, 15 aa, Homo sapiens
  Table 3 sequence identifier: P54687_C293
  MOD_RES (2)..(2): May or may not be conjugated to a chemical probe
RCILDLAHQWGEFKV

SEQ ID NO: 4572 - protein, 26 aa, Homo sapiens
  Table 3 sequence identifier: Q8WUM4_C524
  MOD_RES (8)..(8): May or may not be conjugated to a chemical probe
RDTIVLLCKPEPELNAAIPSANPAKT

SEQ ID NO: 4573 - protein, 10 aa, Homo sapiens
  Table 3 sequence identifier: Q8WUM4_C691
  MOD_RES (2)..(2): May or may not be conjugated to a chemical probe
KCSDIVFARK

SEQ ID NO: 4574 - protein, 18 aa, Homo sapiens
  Table 3 sequence identifier: Q9H9A7_C366
  MOD_RES (16)..(16): May or may not be conjugated to a chemical probe
RFSHNPNTTNNFSLTCKN

SEQ ID NO: 4575 - protein, 17 aa, Homo sapiens
  Table 3 sequence identifier: Q13315_C2021
  MOD_RES (12)..(12): May or may not be conjugated to a chemical probe
RSIGEPDSLYGCGGGKM

SEQ ID NO: 4576 - protein, 22 aa, Homo sapiens
  Table 3 sequence identifier: P11766_C174
  MOD_RES (7)..(7): May or may not be conjugated to a chemical probe
KVCLLGCGISTGYGAAVNTAKL

SEQ ID NO: 4577 - protein, 13 aa, Homo sapiens
  Table 3 sequence identifier: Q96EI5_C34
  MOD_RES (7)..(7): May or may not be conjugated to a chemical probe
RKPEVTCTLEDKK

SEQ ID NO: 4578 - protein, 34 aa, Homo sapiens
  Table 3 sequence identifier: Q9NR45_C184
  MOD_RES (19)..(19): May or may not be conjugated to a chemical probe
KQVYQIVKPLNPNFCFLQCTSAYPLQPEDVNLRV

SEQ ID NO: 4579 - protein, 33 aa, Homo sapiens
  Table 3 sequence identifier: Q13542_C35
  MOD_RES (16)..(16): May or may not be conjugated to a chemical probe
RTVAISDAAQLPHDYCTTPGGTLFSTTPGGTRI

SEQ ID NO: 4580 - protein, 24 aa, Homo sapiens
  Table 3 sequence identifier: Q13547_C151
  MOD_RES (9)..(9): May or may not be conjugated to a chemical probe
KKSEASGFCYVNDIVLAILELLKY

SEQ ID NO: 4581 - protein, 25 aa, Homo sapiens
  Table 3 sequence identifier: Q8NF50_C939
  MOD_RES (6)..(6): May or may not be conjugated to a chemical probe
RMSYYCSGSSDAPSSPAAPRPASKK

SEQ ID NO: 4582 - protein, 24 aa, Homo sapiens
  Table 3 sequence identifier: P09110_C218
  MOD_RES (3)..(3): May or may not be conjugated to a chemical probe
KGCFQAEIVPVTTTVHDDKGTKRS

SEQ ID NO: 4583 - protein, 11 aa, Homo sapiens
  Table 3 sequence identifier: O60841_C749
  MOD_RES (2)..(2): May or may not be conjugated to a chemical probe
KCPFIVALNKI

SEQ ID NO: 4584 - protein, 41 aa, Homo sapiens
  Table 3 sequence identifier: Q15306_C223
  MOD_RES (23)..(23): May or may not be conjugated to a chemical probe
RGHHWQGPACENGCQVTGTFYACAPPESQAPGVPTEPSIRS

SEQ ID NO: 4585 - protein, 22 aa, Homo sapiens
  Table 3 sequence identifier: Q96S59_C513
  MOD_RES (13)..(13): May or may not be conjugated to a chemical probe
KGSTAHFSGFESCSNGVISNKA

SEQ ID NO: 4586 - protein, 12 aa, Homo sapiens
  Table 3 sequence identifier: O60443_C180
  MOD_RES (2)..(2): May or may not be conjugated to a chemical probe
KCGGIVGIQTKT

SEQ ID NO: 4587 - protein, 30 aa, Homo sapiens
  Table 3 sequence identifier: P08240_C621
  MOD_RES (26)..(26): May or may not be conjugated to a chemical probe
KVGAAISMTYITSKPIVFVGTGQTYCDLRS

SEQ ID NO: 4588 - protein, 12 aa, Homo sapiens
  Table 3 sequence identifier: Q9NRR5_C29
  MOD_RES (9)..(9): May or may not be conjugated to a chemical probe
KDKEEIVICDRA

SEQ ID NO: 4589 - protein, 34 aa, Homo sapiens
  Table 3 sequence identifier: Q92769_C274
  MOD_RES (27)..(27): May or may not be conjugated to a chemical probe
KVMEMYQPSAVVLQCGADSLSGDRLGCFNLTVKG

SEQ ID NO: 4590 - protein, 35 aa, Homo sapiens
  Table 3 sequence identifier: O43823_C85
  MOD_RES (24)..(24): May or may not be conjugated to a chemical probe
KANDGGLAAGAPAMHMASYGPEPCTDNSDSLIAKI

SEQ ID NO: 4591 - protein, 11 aa, Homo sapiens
  Table 3 sequence identifier: Q9Y3C7_C93
  MOD_RES (8)..(8): May or may not be conjugated to a chemical probe
KELVNAQCAKF

SEQ ID NO: 4592 - protein, 12 aa, Homo sapiens
  Table 3 sequence identifier: Q7Z7A3_C210
  MOD_RES (2)..(2): May or may not be conjugated to a chemical probe
RCRPLQFASQKE

SEQ ID NO: 4593 - protein, 16 aa, Homo sapiens
  Table 3 sequence identifier: Q14696_C180
  MOD_RES (2)..(2): May or may not be conjugated to a chemical probe
RCADVTLEGQVYPGKG

SEQ ID NO: 4594 - protein, 16 aa, Homo sapiens
  Table 3 sequence identifier: P19367_C628
  MOD_RES (5)..(5): May or may not be conjugated to a chemical probe
KATDCVGHDVVTLLRD

SEQ ID NO: 4595 - protein, 27 aa, Homo sapiens
  Table 3 sequence identifier: Q13557_C373
  MOD_RES (3)..(3): May or may not be conjugated to a chemical probe
KICDPGLTAFEPEALGNLVEGMDFHRF

SEQ ID NO: 4596 - protein, 11 aa, Homo sapiens
  Table 3 sequence identifier: Q9HB71_C154
  MOD_RES (9)..(9): May or may not be conjugated to a chemical probe
KTDTVLILCRK

SEQ ID NO: 4597 - protein, 22 aa, Homo sapiens
  Table 3 sequence identifier: O00148_C299
  MOD_RES (2)..(2): May or may not be conjugated to a chemical probe
RCMALAQLLVEQNFPAIAIHRG

SEQ ID NO: 4598 - protein, 10 aa, Homo sapiens
  Table 3 sequence identifier: Q9BW19_C509
  MOD_RES (7)..(7): May or may not be conjugated to a chemical probe
RYVPVSCEKE

SEQ ID NO: 4599 - protein, 34 aa, Homo sapiens
  Table 3 sequence identifier: P48643_C440
  MOD_RES (24)..(24): May or may not be conjugated to a chemical probe
RVVYGGGAAEISCALAVSQEADKCPTLEQYAMRA

SEQ ID NO: 4600 - protein, 27 aa, Homo sapiens
  Table 3 sequence identifier: Q03164_C2841
  MOD_RES (12)..(12): May or may not be conjugated to a chemical probe
KSDSDNNNSDDCGNILPSDIMDFVLKN

SEQ ID NO: 4601 - protein, 12 aa, Homo sapiens
  Table 3 sequence identifier: Q9H0L4_C441
  MOD_RES (6)..(6): May or may not be conjugated to a chemical probe
RGMETCAMETRG

SEQ ID NO: 4602 - protein, 15 aa, Homo sapiens
  Table 3 sequence identifier: P51553_C148
  MOD_RES (13)..(13): May or may not be conjugated to a chemical probe
RTSLDLYANVIHCKS

SEQ ID NO: 4603 - protein, 11 aa, Homo sapiens
  Table 3 sequence identifier: Q9Y678_C813
  MOD_RES (8)..(8): May or may not be conjugated to a chemical probe
KFLGMHPCERS

SEQ ID NO: 4604 - protein, 41 aa, Homo sapiens
  Table 3 sequence identifier: Q9UBB4_C405
  MOD_RES (22)..(22): May or may not be conjugated to a chemical probe
KNKDNQDKVNELDGIPLILDNCNISDSNPFLTQWVIYAIRN

SEQ ID NO: 4605 - protein, 11 aa, Homo sapiens
  Table 3 sequence identifier: Q9C0C2_C1114
  MOD_RES (4)..(4): May or may not be conjugated to a chemical probe
RDFCIEASERS

SEQ ID NO: 4606 - protein, 19 aa, Homo sapiens
  Table 3 sequence identifier: Q9C0C2_C1175
  MOD_RES (8)..(8): May or may not be conjugated to a chemical probe
RNLEVSSCVGSGGSSEARE

SEQ ID NO: 4607 - protein, 18 aa, Homo sapiens
  Table 3 sequence identifier: P09651_C43
  MOD_RES (13)..(13): May or may not be conjugated to a chemical probe
RSHFEQWGTLTDCVVMRD

SEQ ID NO: 4608 - protein, 45 aa, Homo sapiens
  Table 3 sequence identifier: Q96R06_C307
  MOD_RES (21)..(21): May or may not be conjugated to a chemical probe
KESETEDQALVSSVEDILSTCLTPNLVEMESQEAPGPAVEDVGRI

SEQ ID NO: 4609 - protein, 22 aa, Homo sapiens
  Table 3 sequence identifier: Q8NFH8_C380
  MOD_RES (4)..(4): May or may not be conjugated to a chemical probe
KWDCQLFDSYSESLPANQQPRD

SEQ ID NO: 4610 - protein, 20 aa, Homo sapiens
  Table 3 sequence identifier: Q14204_C3325
  MOD_RES (8)..(8): May or may not be conjugated to a chemical probe
KLALESICLLLGESTTDWKQ

SEQ ID NO: 4611 - protein, 14 aa, Homo sapiens
  Table 3 sequence identifier: Q14204_C4121
  MOD_RES (11)..(11): May or may not be conjugated to a chemical probe
KKLHSLQPHACFRL

SEQ ID NO: 4612 - protein, 21 aa, Homo sapiens
  Table 3 sequence identifier: O75643_C502
  MOD_RES (13)..(13): May or may not be conjugated to a chemical probe
RAALETDENLLLCAPTGAGKT

SEQ ID NO: 4613 - protein, 12 aa, Homo sapiens
  Table 3 sequence identifier: O75643_C516
  MOD_RES (8)..(8): May or may not be conjugated to a chemical probe
KTNVALMCMLRE

SEQ ID NO: 4614 - protein, 11 aa, Homo sapiens
  Table 3 sequence identifier: Q13085_C1297
  MOD_RES (4)..(4): May or may not be conjugated to a chemical probe
KTDCDIEDDRL

SEQ ID NO: 4615 - protein, 24 aa, Homo sapiens
  Table 3 sequence identifier: P04049_C27
  MOD_RES (10)..(10): May or may not be conjugated to a chemical probe
KDAVFDGSSCISPTIVQQFGYQRR

SEQ ID NO: 4616 - protein, 37 aa, Homo sapiens
  Table 3 sequence identifier: Q53T59_C287
  MOD_RES (24)..(24): May or may not be conjugated to a chemical probe
KLFDDPDLGGAIPLGDSLLLPAACESGGPTPSLSHRD

SEQ ID NO: 4617 - protein, 9 aa, Homo sapiens
  Table 3 sequence identifier: P60468_C39
  MOD_RES (5)..(5): May or may not be conjugated to a chemical probe
KNASCGTRS

SEQ ID NO: 4618 - protein, 22 aa, Homo sapiens
  Table 3 sequence identifier: Q15019_C114
  MOD_RES (19)..(19): May or may not be conjugated to a chemical probe
RLTVVDTPGYGDAINCRDCFKT

SEQ ID NO: 4619 - protein, 22 aa, Homo sapiens
  Table 3 sequence identifier: Q15643_C1299
  MOD_RES (18)..(18): May or may not be conjugated to a chemical probe
KNFGQELAQVQHSIGQLCNTKD

SEQ ID NO: 4620 - protein, 9 aa, Homo sapiens
  Table 3 sequence identifier: Q13541_C62
  MOD_RES (7)..(7): May or may not be conjugated to a chemical probe
RKFLMECRN

SEQ ID NO: 4621 - protein, 8 aa, Homo sapiens
  Table 3 sequence identifier: Q9HD42_C44
  MOD_RES (5)..(5): May or may not be conjugated to a chemical probe
KNVECARV

SEQ ID NO: 4622 - protein, 21 aa, Homo sapiens
  Table 3 sequence identifier: O15371_C327
  MOD_RES (18)..(18): May or may not be conjugated to a chemical probe
RNLAMEATYINHNFSQQCLRM

SEQ ID NO: 4623 - protein, 19 aa, Homo sapiens
  Table 3 sequence identifier: Q06187_C337
  MOD_RES (6)..(6): May or may not be conjugated to a chemical probe
RHYVVCSTPQSQYYLAEKH

SEQ ID NO: 4624 - protein, 17 aa, Homo sapiens
  Table 3 sequence identifier: P55060_C344
  MOD_RES (14)..(14): May or may not be conjugated to a chemical probe
KNLFEDQNTLTSICEKV

SEQ ID NO: 4625 - protein, 36 aa, Homo sapiens
  Table 3 sequence identifier: Q8IUD2_C1101
  MOD_RES (21)..(21): May or may not be conjugated to a chemical probe
RDNAELQEFANAILQQIADHCPDILEQVVNALEESS

SEQ ID NO: 4626 - protein, 12 aa, Homo sapiens
  Table 3 sequence identifier: Q9UBE0_C342
  MOD_RES (8)..(8): May or may not be conjugated to a chemical probe
KGNGIVECLGPK

SEQ ID NO: 4627 - protein, 32 aa, Homo sapiens
  Table 3 sequence identifier: Q13459_C2028
  MOD_RES (14)..(14): May or may not be conjugated to a chemical probe
RGASEGPPAPALPCPGAPTPSPLPTVAAPPRR

SEQ ID NO: 4628 - protein, 37 aa, Homo sapiens
  Table 3 sequence identifier: P41236_C86
  MOD_RES (20)..(20): May or may not be conjugated to a chemical probe
KIDEPSTPYHSMMGDDEDACSDTEATEAMAPDILARK

SEQ ID NO: 4629 - protein, 13 aa, Homo sapiens
  Table 3 sequence identifier: Q6IA86_C746
  MOD_RES (10)..(10): May or may not be conjugated to a chemical probe
RYVVAVGLECGKI

SEQ ID NO: 4630 - protein, 18 aa, Homo sapiens
  Table 3 sequence identifier: O75815_C449
  MOD_RES (5)..(5): May or may not be conjugated to a chemical probe
KLPSCAQGSHTELLTAKQ

SEQ ID NO: 4631 - protein, 14 aa, Homo sapiens
  Table 3 sequence identifier: Q08J23_C599
  MOD_RES (10)..(10): May or may not be conjugated to a chemical probe
RNNSGEEFDCAFRL

SEQ ID NO: 4632 - protein, 16 aa, Homo sapiens
  Table 3 sequence identifier: O15231_C466
  MOD_RES (4)..(4): May or may not be conjugated to a chemical probe
RESCGSSVLTDFEGKD

SEQ ID NO: 4633 - protein, 18 aa, Homo sapiens
  Table 3 sequence identifier: Q8TF05_C566
  MOD_RES (16)..(16): May or may not be conjugated to a chemical probe
RSDLQDELDINELPNCKI

SEQ ID NO: 4634 - protein, 10 aa, Homo sapiens
  Table 3 sequence identifier: Q86VQ1_C151
  MOD_RES (8)..(8): May or may not be conjugated to a chemical probe
RSPGSPVCRA

SEQ ID NO: 4635 - protein, 13 aa, Homo sapiens
  Table 3 sequence identifier: Q66K14_C839
  MOD_RES (10)..(10): May or may not be conjugated to a chemical probe
KHLASQYWGCSRT

SEQ ID NO: 4636 - protein, 10 aa, Homo sapiens
  Table 3 sequence identifier: O75676_C257
  MOD_RES (2)..(2): May or may not be conjugated to a chemical probe
KCSPPFPPRI

SEQ ID NO: 4637 - protein, 20 aa, Homo sapiens
  Table 3 sequence identifier: Q01082_C2227
  MOD_RES (8)..(8): May or may not be conjugated to a chemical probe
RSWHNVYCVINNQEMGFYKD

SEQ ID NO: 4638 - protein, 9 aa, Homo sapiens
  Table 3 sequence identifier: P61812_C89
  MOD_RES (6)..(6): May or may not be conjugated to a chemical probe
RRAAACERE

SEQ ID NO: 4639 - protein, 9 aa, Homo sapiens
  Table 3 sequence identifier: P42704_C927
  MOD_RES (6)..(6): May or may not be conjugated to a chemical probe
RLQWFCDRC

SEQ ID NO: 4640 - protein, 39 aa, Homo sapiens
  Table 3 sequence identifier: Q02218_C604
  MOD_RES (5)..(5): May or may not be conjugated to a chemical probe
RSMSCPSTGLTEDILTHIGNVASSVPVENFTIHGGLSRI

SEQ ID NO: 4641 - protein, 15 aa, Homo sapiens
  Table 3 sequence identifier: Q99594_C368
  MOD_RES (5)..(5): May or may not be conjugated to a chemical probe
RSPMCEYMINFIHKL

SEQ ID NO: 4642 - protein, 14 aa, Homo sapiens
  Table 3 sequence identifier: P42858_C1961
  MOD_RES (2)..(2): May or may not be conjugated to a chemical probe
RCENLSTPTMLKKT

SEQ ID NO: 4643 - protein, 10 aa, Homo sapiens
  Table 3 sequence identifier: P42858_C2971
  MOD_RES (6)..(6): May or may not be conjugated to a chemical probe
RKGFPCEARV

SEQ ID NO: 4644 - protein, 45 aa, Homo sapiens
  Table 3 sequence identifier: P82675_C211
  MOD_RES (21)..(21): May or may not be conjugated to a chemical probe
RGWSGNSWGGISLGPPDPGPCGETYEDFDTRILEVRNVFTMTAKE

SEQ ID NO: 4645 - protein, 19 aa, Homo sapiens
  Table 3 sequence identifier: P21291_C25
  MOD_RES (11)..(11): May or may not be conjugated to a chemical probe
KTVYFAEEVQCEGNSFHKS

SEQ ID NO: 4646 - protein, 9 aa, Homo sapiens
  Table 3 sequence identifier: O43447_C131
  MOD_RES (2)..(2): May or may not be conjugated to a chemical probe
KCDWLDGKH

SEQ ID NO: 4647 - protein, 52 aa, Homo sapiens
  Table 3 sequence identifier: Q9UBR2_C132
  MOD_RES (23)..(23): May or may not be conjugated to a chemical probe
KGAWPSTLLSVQNVIDCGNAGSCEGGNDLSVWDYAHQHGIPDETCNNYQAKD

SEQ ID NO: 4648 - protein, 13 aa, Homo sapiens
  Table 3 sequence identifier: P31939_C101
  MOD_RES (5)..(5): May or may not be conjugated to a chemical probe
RVVACNLYPFVKT

SEQ ID NO: 4649 - protein, 21 aa, Homo sapiens
  Table 3 sequence identifier: Q9P2E9_C1128
  MOD_RES (16)..(16): May or may not be conjugated to a chemical probe
KLREAEETQSTLQAECDQYRS

SEQ ID NO: 4650 - protein, 24 aa, Homo sapiens
  Table 3 sequence identifier: Q9NWU1_C209
  MOD_RES (11)..(11): May or may not be conjugated to a chemical probe
KGPNHAVSTACTTGAHAVGDSFRF

SEQ ID NO: 4651 - protein, 10 aa, Homo sapiens
  Table 3 sequence identifier: O95059_C78
  MOD_RES (3)..(3): May or may not be conjugated to a chemical probe
RICSSGLVKL

SEQ ID NO: 4652 - protein, 32 aa, Homo sapiens
  Table 3 sequence identifier: P51570_C322
  MOD_RES (11)..(11): May or may not be conjugated to a chemical probe
RSLRDDYEVSCPELDQLVEAALAVPGVYGSRM

SEQ ID NO: 4653 - protein, 10 aa, Homo sapiens
  Table 3 sequence identifier: P28340_C1076
  MOD_RES (3)..(3): May or may not be conjugated to a chemical probe
RDCPIFYMRK

SEQ ID NO: 4654 - protein, 28 aa, Homo sapiens
  Table 3 sequence identifier: Q7Z5L9_C555
  MOD_RES (2)..(2): May or may not be conjugated to a chemical probe
KCPLVGSNVPWAFMQGEIATILAGDVKV

SEQ ID NO: 4655 - protein, 42 aa, Homo sapiens
  Table 3 sequence identifier: P54886_C161
  MOD_RES (3)..(3): May or may not be conjugated to a chemical probe
RACAAAGQSGLMALYEAMFTQYSICAAQILVTNLDFHDEQKR

SEQ ID NO: 4656 - protein, 12 aa, Homo sapiens
  Table 3 sequence identifier: P17987_C236
  MOD_RES (4)..(4): May or may not be conjugated to a chemical probe
KIACLDFSLQKT

SEQ ID NO: 4657 - protein, 19 aa, Homo sapiens
  Table 3 sequence identifier: O43143_C774
  MOD_RES (15)..(15): May or may not be conjugated to a chemical probe
KIAPQYYDMSNFPQCEAKR

SEQ ID NO: 4658 - protein, 17 aa, Homo sapiens
  Table 3 sequence identifier: P67775_C251
  MOD_RES (13)..(13): May or may not be conjugated to a chemical probe
RAHQLVMEGYNWCHDRN

SEQ ID NO: 4659 - protein, 18 aa, Homo sapiens
  Table 3 sequence identifier: Q92667_C102
  MOD_RES (16)..(16): May or may not be conjugated to a chemical probe
KLPAEPPALLQTHPPCRR

SEQ ID NO: 4660 - protein, 15 aa, Homo sapiens
  Table 3 sequence identifier: Q99615_C116
  MOD_RES (13)..(13): May or may not be conjugated to a chemical probe
KCHLSLGNAMAACRS

SEQ ID NO: 4661 - protein, 13 aa, Homo sapiens
  Table 3 sequence identifier: P04062_C165
  MOD_RES (7)..(7): May or may not be conjugated to a chemical probe
RVPMASCDFSIRT

SEQ ID NO: 4662 - protein, 23 aa, Homo sapiens
  Table 3 sequence identifier: Q96P11_C308
  MOD_RES (14)..(14): May or may not be conjugated to a chemical probe
RYHEVHYILLDPSCSGSGMPSRQ

SEQ ID NO: 4663 - protein, 11 aa, Homo sapiens
  Table 3 sequence identifier: Q86X02_C160
  MOD_RES (8)..(8): May or may not be conjugated to a chemical probe
RTIHTFPCLKE

SEQ ID NO: 4664 - protein, 25 aa, Homo sapiens
  Table 3 sequence identifier: P16035_C159
  MOD_RES (2)..(2): May or may not be conjugated to a chemical probe
RCPMIPCYISSPDECLWMDWVTEKN

SEQ ID NO: 4665 - protein, 20 aa, Homo sapiens
  Table 3 sequence identifier: Q52LW3_C793
  MOD_RES (14)..(14): May or may not be conjugated to a chemical probe
KKNSLEDKKWPNMCIEINRI

SEQ ID NO: 4666 - protein, 17 aa, Homo sapiens
  Table 3 sequence identifier: H3BQZ7_C538
  MOD_RES (8)..(8): May or may not be conjugated to a chemical probe
RNFILDQCNVYNSGQRR

SEQ ID NO: 4667 - protein, 16 aa, Homo sapiens
  Table 3 sequence identifier: Q9BQ90_C213
  MOD_RES (13)..(13): May or may not be conjugated to a chemical probe
RFGPFHSNNEIYCNRI

SEQ ID NO: 4668 - protein, 26 aa, Homo sapiens
  Table 3 sequence identifier: P13797_C167
  MOD_RES (24)..(24): May or may not be conjugated to a chemical probe
RHVIPMNPNTDDLFKAVGDGIVLCKM

SEQ ID NO: 4669 - protein, 13 aa, Homo sapiens
  Table 3 sequence identifier: Q06210_C620
  MOD_RES (2)..(2): May or may not be conjugated to a chemical probe
KCQNALQQVVARQ

SEQ ID NO: 4670 - protein, 15 aa, Homo sapiens
  Table 3 sequence identifier: Q7L576_C98
  MOD_RES (2)..(2): May or may not be conjugated to a chemical probe
KCNEQPNRVEIYEKT

SEQ ID NO: 4671 - protein, 14 aa, Homo sapiens
  Table 3 sequence identifier: Q7L576_C1241
  MOD_RES (2)..(2): May or may not be conjugated to a chemical probe
RCFQPPIHQSLASS

SEQ ID NO: 4672 - protein, 12 aa, Homo sapiens
  Table 3 sequence identifier: Q03001_C5056
  MOD_RES (4)..(4): May or may not be conjugated to a chemical probe
KKFCLENMTQKF

SEQ ID NO: 4673 - protein, 15 aa, Homo sapiens
  Table 3 sequence identifier: Q03001_C5394
  MOD_RES (12)..(12): May or may not be conjugated to a chemical probe
RAAQLQEALLHCGRF

SEQ ID NO: 4674 - protein, 20 aa, Homo sapiens
  Table 3 sequence identifier: Q9UFW8_C92
  MOD_RES (11)..(11): May or may not be conjugated to a chemical probe
KQRPLTASLQCNSTAQTEKV

SEQ ID NO: 4675 - protein, 10 aa, Homo sapiens
  Table 3 sequence identifier: P49721_C163
  MOD_RES (2)..(2): May or may not be conjugated to a chemical probe
KCLEELQKRF

SEQ ID NO: 4676 - protein, 11 aa, Homo sapiens
  Table 3 sequence identifier: Q96I51_C329
  MOD_RES (2)..(2): May or may not be conjugated to a chemical probe
RCLHFSGVGKV

SEQ ID NO: 4677 - protein, 17 aa, Homo sapiens
  Table 3 sequence identifier: O60884_C280
  MOD_RES (9)..(9): May or may not be conjugated to a chemical probe
KIGLVEALCGFQFTFKH

SEQ ID NO: 4678 - protein, 10 aa, Homo sapiens
  Table 3 sequence identifier: O60884_C308
  MOD_RES (7)..(7): May or may not be conjugated to a chemical probe
KVIEPGCVRV

SEQ ID NO: 4679 - protein, 28 aa, Homo sapiens
  Table 3 sequence identifier: Q9BV19_C189
  MOD_RES (18)..(18): May or may not be conjugated to a chemical probe
KISMMDTLLSQSVALPPCTEPNFQGLTH

SEQ ID NO: 4680 - protein, 25 aa, Homo sapiens
  Table 3 sequence identifier: P29353_C248
  MOD_RES (23)..(23): May or may not be conjugated to a chemical probe
KFAGMPITLTVSTSSLNLMAADCKQ

SEQ ID NO: 4681 - protein, 11 aa, Homo sapiens
  Table 3 sequence identifier: Q7Z4Q2_C57
  MOD_RES (3)..(3): May or may not be conjugated to a chemical probe
RECACAGLARL

SEQ ID NO: 4682 - protein, 29 aa, Homo sapiens
  Table 3 sequence identifier: O75376_C2403
  MOD_RES (13)..(13): May or may not be conjugated to a chemical probe
RMLSSTPPTPIACAPSAVNQAAPHQQNRI

SEQ ID NO: 4683 - protein, 57 aa, Homo sapiens
  Table 3 sequence identifier: Q9Y6A5_C293
  MOD_RES (37)..(37): May or may not be conjugated to a chemical probe
KEACGGAPLQGLPGEALGCPAGVGTPVPADGTQTLTCAHTSAPESTAPTNHLVAGRA

SEQ ID NO: 4684 - protein, 14 aa, Homo sapiens
  Table 3 sequence identifier: P31323_C149
  MOD_RES (6)..(6): May or may not be conjugated to a chemical probe
RLQEACKDILLFKN

SEQ ID NO: 4685 - protein, 8 aa, Homo sapiens
  Table 3 sequence identifier: Q15120_C41
  MOD_RES (5)..(5): May or may not be conjugated to a chemical probe
RDNACEKT

SEQ ID NO: 4686 - protein, 18 aa, Homo sapiens
  Table 3 sequence identifier: P05455_C18
  MOD_RES (3)..(3): May or may not be conjugated to a chemical probe
KICHQIEYYFGDFNLPRD

SEQ ID NO: 4687 - protein, 25 aa, Homo sapiens
  Table 3 sequence identifier: Q08257_C166
  MOD_RES (20)..(20): May or may not be conjugated to a chemical probe
KAGESVLVHGASGGVGLAACQIARA

SEQ ID NO: 4688 - protein, 26 aa, Homo sapiens
  Table 3 sequence identifier: P54278_C216
  MOD_RES (7)..(7): May or may not be conjugated to a chemical probe
KRQPVVCTGGSPSIKENIGSVFGQKQ

SEQ ID NO: 4689 - protein, 27 aa, Homo sapiens
  Table 3 sequence identifier: P05534_C363
  MOD_RES (25)..(25): May or may not be conjugated to a chemical probe
RKGGSYSQAASSDSAQGSDVSLTACKV

SEQ ID NO: 4690 - protein, 25 aa, Homo sapiens
  Table 3 sequence identifier: Q96P16_C100
  MOD_RES (22)..(22): May or may not be conjugated to a chemical probe
KDFAPVIVEAFKHVSSETDESCKKH

SEQ ID NO: 4691 - protein, 16 aa, Homo sapiens
  Table 3 sequence identifier: Q9NWK9_C211
  MOD_RES (14)..(14): May or may not be conjugated to a chemical probe
KVKEEPPINHPVGCKR

SEQ ID NO: 4692 - protein, 25 aa, Homo sapiens
  Table 3 sequence identifier: Q9BZF9_C408
  MOD_RES (12)..(12): May or may not be conjugated to a chemical probe
KQGQMYMADSQCTSPGIPAHMQSRS

SEQ ID NO: 4693 - protein, 11 aa, Homo sapiens
  Table 3 sequence identifier: P57081_C412
  MOD_RES (11)..(11): May or may not be conjugated to a chemical probe
KMRPGEATLSC

SEQ ID NO: 4694 - protein, 22 aa, Homo sapiens
  Table 3 sequence identifier: Q9H4L7_C861
  MOD_RES (15)..(15): May or may not be conjugated to a chemical probe
VLGCILSELKRVLGCILSELKQ

SEQ ID NO: 4695 - protein, 17 aa, Homo sapiens
  Table 3 sequence identifier: Q14149_C671
  MOD_RES (10)..(10): May or may not be conjugated to a chemical probe
RNDAVILPSCVEAEAKI

SEQ ID NO: 4696 - protein, 24 aa, Homo sapiens
  Table 3 sequence identifier: Q8WUA7_C151
  MOD_RES (10)..(10): May or may not be conjugated to a chemical probe
KSVSESHTSCPAESASDAAPLQRS

SEQ ID NO: 4697 - protein, 18 aa, Homo sapiens
  Table 3 sequence identifier: Q2T9J0_C284
  MOD_RES (15)..(15): May or may not be conjugated to a chemical probe
RPAGALVALVVAPLCWKA

SEQ ID NO: 4698 - protein, 30 aa, Homo sapiens
  Table 3 sequence identifier: Q96C86_C37
  MOD_RES (25)..(25): May or may not be conjugated to a chemical probe
RELDVEEAHAASTEEKEAGVGNGTCAPVRL

SEQ ID NO: 4699 - protein, 32 aa, Homo sapiens
  Table 3 sequence identifier: P30084_C143
  MOD_RES (17)..(17): May or may not be conjugated to a chemical probe
KKPVIAAVNGYAFGGGCELAMMCDIIYAGEKA

SEQ ID NO: 4700 - protein, 19 aa, Homo sapiens
  Table 3 sequence identifier: Q29RF7_C1093
  MOD_RES (5)..(5): May or may not be conjugated to a chemical probe
KSALCNADSPKDPVLPMKF

SEQ ID NO: 4701 - protein, 17 aa, Homo sapiens
  Table 3 sequence identifier: O15111_C30
  MOD_RES (11)..(11): May or may not be conjugated to a chemical probe
RLGTGGFGNVCLYQHRE

SEQ ID NO: 4702 - protein, 24 aa, Homo sapiens
  Table 3 sequence identifier: Q9H7B4_C238
  MOD_RES (12)..(12): May or may not be conjugated to a chemical probe
RDIEVGEELTICYLDMLMTSEERR

SEQ ID NO: 4703 - protein, 16 aa, Homo sapiens
  Table 3 sequence identifier: Q8TDX7_C53
  MOD_RES (4)..(4): May or may not be conjugated to a chemical probe
RAACLLDGVPVALKKV

SEQ ID NO: 4704 - protein, 9 aa, Homo sapiens
  Table 3 sequence identifier: Q8TDX7_C298
  MOD_RES (5)..(5): May or may not be conjugated to a chemical probe
RMHACTASS

SEQ ID NO: 4705 - protein, 17 aa, Homo sapiens
  Table 3 sequence identifier: Q86W56_C155
  MOD_RES (15)..(15): May or may not be conjugated to a chemical probe
KSTQYLNQHQTAAMCKW

SEQ ID NO: 4706 - protein, 17 aa, Homo sapiens
  Table 3 sequence identifier: P43246_C199
  MOD_RES (3)..(3): May or may not be conjugated to a chemical probe
KECVLPGGETAGDMGKL

SEQ ID NO: 4707 - protein, 33 aa, Homo sapiens
  Table 3 sequence identifier: P28702_C340
  MOD_RES (27)..(27): May or may not be conjugated to a chemical probe
KSDQGVEGPGGTGGSGSSPNDPVTNICQAADKQ

SEQ ID NO: 4708 - protein, 14 aa, Homo sapiens
  Table 3 sequence identifier: Q13283_C73
  MOD_RES (10)..(10): May or may not be conjugated to a chemical probe
KVMSQNFTNCHTKI

SEQ ID NO: 4709 - protein, 28 aa, Homo sapiens
  Table 3 sequence identifier: O75608_C173
  MOD_RES (12)..(12): May or may not be conjugated to a chemical probe
RDISILQCHGDCDPLVPLMFGSLTVEKL

SEQ ID NO: 4710 - protein, 23 aa, Homo sapiens
  Table 3 sequence identifier: P23497_C248
  MOD_RES (8)..(8): May or may not be conjugated to a chemical probe
KAEPTESCEQIAVQVNNGDAGRE

SEQ ID NO: 4711 - protein, 15 aa, Homo sapiens
  Table 3 sequence identifier: Q8WX92_C115
  MOD_RES (11)..(11): May or may not be conjugated to a chemical probe
KMPSLQPVVMCVMKH

SEQ ID NO: 4712 - protein, 23 aa, Homo sapiens
  Table 3 sequence identifier: O75044_C820
  MOD_RES (6)..(6): May or may not be conjugated to a chemical probe
RAGASCPSGGHVADIYLANINKQ

SEQ ID NO: 4713 - protein, 15 aa, Homo sapiens
  Table 3 sequence identifier: Q13464_C1206
  MOD_RES (13)..(13): May or may not be conjugated to a chemical probe
KIFQILYANEGECRK

SEQ ID NO: 4714 - protein, 22 aa, Homo sapiens
  Table 3 sequence identifier: O96013_C58
  MOD_RES (11)..(11): May or may not be conjugated to a chemical probe
RRPKPLVDPACITSIQPGAPKT

SEQ ID NO: 4715 - protein, 19 aa, Homo sapiens
  Table 3 sequence identifier: P15056_C748
  MOD_RES (14)..(14): May or may not be conjugated to a chemical probe
RAGFQTEDFSLYACASPKT

SEQ ID NO: 4716 - protein, 15 aa, Homo sapiens
  Table 3 sequence identifier: Q16762_C248
  MOD_RES (13)..(13): May or may not be conjugated to a chemical probe
KKVDLSQPLIATCRK

SEQ ID NO: 4717 - protein, 15 aa, Homo sapiens
  Table 3 sequence identifier: P05198_C218
  MOD_RES (6)..(6): May or may not be conjugated to a chemical probe
RAGLNCSTENMPIKI

SEQ ID NO: 4718 - protein, 26 aa, Homo sapiens
  Table 3 sequence identifier: P15374_C209
  MOD_RES (24)..(24): May or may not be conjugated to a chemical probe
RKPFPINHGETSDETLLEDAIEVCKK

SEQ ID NO: 4719 - protein, 19 aa, Homo sapiens
  Table 3 sequence identifier: Q9NZN4_C356
  MOD_RES (16)..(16): May or may not be conjugated to a chemical probe
KIQLEHHISPGDFPDCQKM

SEQ ID NO: 4720 - protein, 12 aa, Homo sapiens
  Table 3 sequence identifier: Q9NZN8_C175
  MOD_RES (8)..(8): May or may not be conjugated to a chemical probe
RSSPSIICMPKQ

SEQ ID NO: 4721 - protein, 44 aa, Homo sapiens
  Table 3 sequence identifier: P52294_C529
  MOD_RES (35)..(35): May or may not be conjugated to a chemical probe
KAFDLIEHYFGTEDEDSSIAPQVDLNQQQYIFQQCEAPMEGFQL

SEQ ID NO: 4722 - protein, 29 aa, Homo sapiens
  Table 3 sequence identifier: O76003_C46
  MOD_RES (16)..(16): May or may not be conjugated to a chemical probe
KSLLVVHFWAPWAPQCAQMNEVMAELAKE

SEQ ID NO: 4723 - protein, 30 aa, Homo sapiens
  Table 3 sequence identifier: P35914_C307
  MOD_RES (24)..(24): May or may not be conjugated to a chemical probe
LLEAGNFICQALNRKLLEAGNFICQALNRK

SEQ ID NO: 4724 - protein, 20 aa, Homo sapiens
  Table 3 sequence identifier: Q00796_C179
  MOD_RES (5)..(5): May or may not be conjugated to a chemical probe
KVLVCGAGPIGMVTLLVAKA

SEQ ID NO: 4725 - protein, 15 aa, Homo sapiens
  Table 3 sequence identifier: P27797_C105
  MOD_RES (8)..(8): May or may not be conjugated to a chemical probe
KHEQNIDCGGGYVKL

SEQ ID NO: 4726 - protein, 29 aa, Homo sapiens
  Table 3 sequence identifier: Q969E4_C44
  MOD_RES (4)..(4): May or may not be conjugated to a chemical probe
KTECEGKREDEGEPGDEGQLEDEGSQEKQ

SEQ ID NO: 4727 - protein, 11 aa, Homo sapiens
  Table 3 sequence identifier: Q7KZF4_C152
  MOD_RES (5)..(5): May or may not be conjugated to a chemical probe
RLSECEEQAKA

SEQ ID NO: 4728 - protein, 32 aa, Homo sapiens
  Table 3 sequence identifier: Q9P1U0_C78
  MOD_RES (23)..(23): May or may not be conjugated to a chemical probe
KTSVVFHQLGTAMPMSVEEGPECQGPVVDRRC

SEQ ID NO: 4729 - protein, 13 aa, Homo sapiens
  Table 3 sequence identifier: Q8WZ82_C152
  MOD_RES (10)..(10): May or may not be conjugated to a chemical probe
RFILLVSGFCPRG

SEQ ID NO: 4730 - protein, 11 aa, Homo sapiens
  Table 3 sequence identifier: Q9NPD3_C97
  MOD_RES (3)..(3): May or may not be conjugated to a chemical probe
KSCEMGLQLRQ

SEQ ID NO: 4731 - protein, 10 aa, Homo sapiens
  Table 3 sequence identifier: P52701_C1294
  MOD_RES (7)..(7): May or may not be conjugated to a chemical probe
KFIKGACPKS

SEQ ID NO: 4732 - protein, 13 aa, Homo sapiens
  Table 3 sequence identifier: P52701_C1337
  MOD_RES (7)..(7): May or may not be conjugated to a chemical probe
RLFREVCLASERS

SEQ ID NO: 4733 - protein, 12 aa, Homo sapiens
  Table 3 sequence identifier: Q15637_C279
  MOD_RES (9)..(9): May or may not be conjugated to a chemical probe
RSITNTTVCTKC

SEQ ID NO: 4734 - protein, 15 aa, Homo sapiens
  Table 3 sequence identifier: P49366_C177
  MOD_RES (13)..(13): May or may not be conjugated to a chemical probe
RIGNLLVPNENYCKF

SEQ ID NO: 4735 - protein, 9 aa, Homo sapiens
  Table 3 sequence identifier: Q96PQ7_C677
  MOD_RES (5)..(5): May or may not be conjugated to a chemical probe
RLSDCVERY

SEQ ID NO: 4736 - protein, 24 aa, Homo sapiens
  Table 3 sequence identifier: O95785_C1429
  MOD_RES (9)..(9): May or may not be conjugated to a chemical probe
RQFGVTEWCVNGSPIETLSEWIKH

SEQ ID NO: 4737 - protein, 21 aa, Homo sapiens
  Table 3 sequence identifier: P49756_C795
  MOD_RES (18)..(18): May or may not be conjugated to a chemical probe
KIIEYIGEEEATLVDFVCSKV

SEQ ID NO: 4738 - protein, 16 aa, Homo sapiens
  Table 3 sequence identifier: P49591_C398
  MOD_RES (9)..(9): May or may not be conjugated to a chemical probe
RELVSCSNCTDYQARR

SEQ ID NO: 4739 - protein, 12 aa, Homo sapiens
  Table 3 sequence identifier: P31751_C77
  MOD_RES (2)..(2): May or may not be conjugated to a chemical probe
RCLQWTTVIERT

SEQ ID NO: 4740 - protein, 12 aa, Homo sapiens
  Table 3 sequence identifier: Q9Y2X3_C205
  MOD_RES (10)..(10): May or may not be conjugated to a chemical probe
KIISDNLTYCKC

SEQ ID NO: 4741 - protein, 20 aa, Homo sapiens
  Table 3 sequence identifier: Q8IZ21_C568
  MOD_RES (18)..(18): May or may not be conjugated to a chemical probe
KLNHRPSEPELNLNSWPCKS

SEQ ID NO: 4742 - protein, 14 aa, Homo sapiens
  Table 3 sequence identifier: O00410_C266
  MOD_RES (3)..(3): May or may not be conjugated to a chemical probe
KLCGDTSLNNMQRQ

SEQ ID NO: 4743 - protein, 19 aa, Homo sapiens
  Table 3 sequence identifier: O95861_C249
  MOD_RES (6)..(6): May or may not be conjugated to a chemical probe
KKWDTCAPEVILHAVGGKL

SEQ ID NO: 4744 - protein, 15 aa, Homo sapiens
  Table 3 sequence identifier: Q9NTK5_C75
  MOD_RES (6)..(6): May or may not be conjugated to a chemical probe
RFDFLCQYHKPASKI

SEQ ID NO: 4745 - protein, 21 aa, Homo sapiens
  Table 3 sequence identifier: P60228_C141
  MOD_RES (6)..(6): May or may not be conjugated to a chemical probe
KFQYECGNYSGAAEYLYFFRV

SEQ ID NO: 4746 - protein, 41 aa, Homo sapiens
  Table 3 sequence identifier: Q05048_C44
  MOD_RES (29)..(29): May or may not be conjugated to a chemical probe
KLIISQLLYDGYISIANGLINEIKPQSVCAPSEQLLHLIKL

SEQ ID NO: 4747 - protein, 15 aa, Homo sapiens
  Table 3 sequence identifier: P41229_C1551
  MOD_RES (6)..(6): May or may not be conjugated to a chemical probe
RLHLPCPQQPPQQQL

SEQ ID NO: 4748 - protein, 23 aa, Homo sapiens
  Table 3 sequence identifier: Q9NZ09_C161
  MOD_RES (11)..(11): May or may not be conjugated to a chemical probe
KADFNLADFECEEDPFDNLELKT

SEQ ID NO: 4749 - protein, 20 aa, Homo sapiens
  Table 3 sequence identifier: Q9H4A4_C151
  MOD_RES (9)..(9): May or may not be conjugated to a chemical probe
RVGEGPGVCWLAPEQTAGKK

SEQ ID NO: 4750 - protein, 30 aa, Homo sapiens
  Table 3 sequence identifier: Q99704_C308
  MOD_RES (5)..(5): May or may not be conjugated to a chemical probe
RIAPCPSQDSLYSDPLDSTSAQAGEGVQRK

SEQ ID NO: 4751 - protein, 20 aa, Homo sapiens
  Table 3 sequence identifier: Q16531_C128
  MOD_RES (18)..(18): May or may not be conjugated to a chemical probe
RIGRPSETGIIGIIDPECRM

SEQ ID NO: 4752 - protein, 30 aa, Homo sapiens
  Table 3 sequence identifier: O43294_C91
  MOD_RES (25)..(25): May or may not be conjugated to a chemical probe
RSPKPAAPAAPPFSSSSGVLGTGLCELDRL

SEQ ID NO: 4753 - protein, 14 aa, Homo sapiens
  Table 3 sequence identifier: P28482_C65
  MOD_RES (11)..(11): May or may not be conjugated to a chemical probe
KISPFEHQTYCQRT

SEQ ID NO: 4754 - protein, 12 aa, Homo sapiens
  Table 3 sequence identifier: P36578_C250
  MOD_RES (3)..(3): May or may not be conjugated to a chemical probe
RFCIWTESAFRK

SEQ ID NO: 4755 - protein, 17 aa, Homo sapiens
  Table 3 sequence identifier: Q9Y5N6_C88
  MOD_RES (5)..(5): May or may not be conjugated to a chemical probe
KSFECLLGLNSNIGIRD

SEQ ID NO: 4756 - protein, 18 aa, Homo sapiens
  Table 3 sequence identifier: P62487_C106
  MOD_RES (13)..(13): May or may not be conjugated to a chemical probe
KVGLFTEIGPMSCFISRH

SEQ ID NO: 4757 - protein, 9 aa, Homo sapiens
  Table 3 sequence identifier: O00139_C406
  MOD_RES (2)..(2): May or may not be conjugated to a chemical probe
KCVEDVLKL

SEQ ID NO: 4758 - protein, 11 aa, Homo sapiens
  Table 3 sequence identifier: P21266_C119
  MOD_RES (3)..(3): May or may not be conjugated to a chemical probe
RLCYSSDHEKL

SEQ ID NO: 4759 - protein, 16 aa, Homo sapiens
  Table 3 sequence identifier: O00622_C78
  MOD_RES (5)..(5): May or may not be conjugated to a chemical probe
KGLECNFGASSTALKG

SEQ ID NO: 4760 - protein, 15 aa, Homo sapiens
  Table 3 sequence identifier: O00622_C117
  MOD_RES (13)..(13): May or may not be conjugated to a chemical probe
RIYQNGESFQPNCKH

SEQ ID NO: 4761 - protein, 11 aa, Homo sapiens
  Table 3 sequence identifier: O00622_C353
  MOD_RES (9)..(9): May or may not be conjugated to a chemical probe
KNVMMIQSCKC

SEQ ID NO: 4762 - protein, 20 aa, Homo sapiens
  Table 3 sequence identifier: Q86WA6_C234
  MOD_RES (4)..(4): May or may not be conjugated to a chemical probe
RVQCPALIVHGEKDPLVPRF

SEQ ID NO: 4763 - protein, 11 aa, Homo sapiens
  Table 3 sequence identifier: Q9BUF5_C354
  MOD_RES (5)..(5): May or may not be conjugated to a chemical probe
KVAVCDIPPRG

SEQ ID NO: 4764 - protein, 10 aa, Homo sapiens
  Table 3 sequence identifier: Q07960_C91
  MOD_RES (8)..(8): May or may not be conjugated to a chemical probe
KIIVFSACRM

SEQ ID NO: 4765 - protein, 18 aa, Homo sapiens
  Table 3 sequence identifier: P78346_C257
  MOD_RES (12)..(12): May or may not be conjugated to a chemical probe
KKPRPSEGDEDCLPASKK

SEQ ID NO: 4766 - protein, 15 aa, Homo sapiens
  Table 3 sequence identifier: P16885_C849
  MOD_RES (13)..(13): May or may not be conjugated to a chemical probe
KQIIEDNPLGSLCRG

SEQ ID NO: 4767 - protein, 15 aa, Homo sapiens
  Table 3 sequence identifier: Q969U7_C168
  MOD_RES (2)..(2): May or may not be conjugated to a chemical probe
RCIPEIDDSEFCIRI

SEQ ID NO: 4768 - protein, 11 aa, Homo sapiens
  Table 3 sequence identifier: Q9BZG1_C38
  MOD_RES (4)..(4): May or may not be conjugated to a chemical probe
RVTCACQEHRT

SEQ ID NO: 4769 - protein, 39 aa, Homo sapiens
  Table 3 sequence identifier: Q96KQ7_C596
  MOD_RES (5)..(5): May or may not be conjugated to a chemical probe
RRPPCDPLADTIDSSGPSLTLPNGGCLSAVGLPLGPGRE

SEQ ID NO: 4770 - protein, 20 aa, Homo sapiens
  Table 3 sequence identifier: Q8IWB7_C401
  MOD_RES (11)..(11): May or may not be conjugated to a chemical probe
KIWDMTPVVGCSLATGFSPH

SEQ ID NO: 4771 - protein, 10 aa, Homo sapiens
  Table 3 sequence identifier: Q14566_C721
  MOD_RES (8)..(8): May or may not be conjugated to a chemical probe
RLGFSEYCRI

SEQ ID NO: 4772 - protein, 15 aa, Homo sapiens
  Table 3 sequence identifier: P17844_C170
  MOD_RES (7)..(7): May or may not be conjugated to a chemical probe
RGDGPICLVLAPTRE

SEQ ID NO: 4773 - protein, 22 aa, Homo sapiens
  Table 3 sequence identifier: O94903_C261
  MOD_RES (8)..(8): May or may not be conjugated to a chemical probe
KKPTPDKCAADVKAPLEVAQEH

SEQ ID NO: 4774 - protein, 15 aa, Homo sapiens
  Table 3 sequence identifier: Q9UPN3_C5346
  MOD_RES (12)..(12): May or may not be conjugated to a chemical probe
RIAQLQEALLHCGKF

SEQ ID NO: 4775 - protein, 24 aa, Homo sapiens
  Table 3 sequence identifier: P53634_C355
  MOD_RES (17)..(17): May or may not be conjugated to a chemical probe
RYYSSEYHYVGGFYGGCNEALMKL

SEQ ID NO: 4776 - protein, 9 aa, Homo sapiens
  Table 3 sequence identifier: Q5VZL5_C948
  MOD_RES (7)..(7): May or may not be conjugated to a chemical probe
KNKALLCKP

SEQ ID NO: 4777 - protein, 15 aa, Homo sapiens
  Table 3 sequence identifier: A5YKK6_C2359
  MOD_RES (9)..(9): May or may not be conjugated to a chemical probe
KLFQSVAQCCMGQKQ

SEQ ID NO: 4778 - protein, 41 aa, Homo sapiens
  Table 3 sequence identifier: Q9BWU0_C336
  MOD_RES (14)..(14): May or may not be conjugated to a chemical probe
RKINAGSQDDEMGCTWGMGEDAVEDDAEENPIVLEFQQERE

SEQ ID NO: 4779 - protein, 36 aa, Homo sapiens
  Table 3 sequence identifier: O75369_C1868
  MOD_RES (31)..(31): May or may not be conjugated to a chemical probe
KTATFTIVTEDAGEGGLDLAIEGPSKAEISCIDNKD

SEQ ID NO: 4780 - protein, 32 aa, Homo sapiens
  Table 3 sequence identifier: O75369_C1876
  MOD_RES (14)..(14): May or may not be conjugated to a chemical probe
KAEISCIDNKDGTCTVTYLPTLPGDYSILVKY

SEQ ID NO: 4781 - protein, 34 aa, Homo sapiens
  Table 3 sequence identifier: P21980_C620
  MOD_RES (19)..(19): May or may not be conjugated to a chemical probe
KLVAEVSLQNPLPVALEGCTFTVEGAGLTEEQKT

SEQ ID NO: 4782 - protein, 28 aa, Homo sapiens
  Table 3 sequence identifier: Q14966_C1279
  MOD_RES (13)..(13): May or may not be conjugated to a chemical probe
KNETVSEILPSTCIVTLVPGIPTGDEKT

SEQ ID NO: 4783 - protein, 22 aa, Homo sapiens
  Table 3 sequence identifier: P50395_C335
  MOD_RES (8)..(8): May or may not be conjugated to a chemical probe
RKSDIYVCMISFAHNVAAQGKY

SEQ ID NO: 4784 - protein, 24 aa, Homo sapiens
  Table 3 sequence identifier: Q13643_C150
  MOD_RES (12)..(12): May or may not be conjugated to a chemical probe
RSFVPDKGAHYCVPCYENKFAPRC

SEQ ID NO: 4785 - protein, 26 aa, Homo sapiens
  Table 3 sequence identifier: Q16181_C161
  MOD_RES (5)..(5): May or may not be conjugated to a chemical probe
RVQCCLYFIAPSGHGLKPLDIEFMKR

SEQ ID NO: 4786 - protein, 19 aa, Homo sapiens
  Table 3 sequence identifier: Q9UPR0_C90
  MOD_RES (14)..(14): May or may not be conjugated to a chemical probe
RGVALAPTPSAVVCTLPRE

SEQ ID NO: 4787 - protein, 27 aa, Homo sapiens
  Table 3 sequence identifier: Q9UPR0_C1095
  MOD_RES (10)..(10): May or may not be conjugated to a chemical probe
KQIHFAAVSCGLNKPGTENADVQKPRR

SEQ ID NO: 4788 - protein, 36 aa, Homo sapiens
  Table 3 sequence identifier: O14787_C132
  MOD_RES (15)..(15): May or may not be conjugated to a chemical probe
KGELQMWPELLPQLCNLLNSEDYNTCEGAFGALQKI

SEQ ID NO: 4789 - protein, 9 aa, Homo sapiens
  Table 3 sequence identifier: O15067_C1338
  MOD_RES (9)..(9): May or may not be conjugated to a chemical probe
RNWTLEGSC

SEQ ID NO: 4790 - protein, 8 aa, Homo sapiens
  Table 3 sequence identifier: Q9NW64_C58
  MOD_RES (3)..(3): May or may not be conjugated to a chemical probe
RWCPGVRM

SEQ ID NO: 4791 - protein, 10 aa, Homo sapiens
  Table 3 sequence identifier: O00273_C21
  MOD_RES (6)..(6): May or may not be conjugated to a chemical probe
RTLKPCLLRR

SEQ ID NO: 4792 - protein, 32 aa, Homo sapiens
  Table 3 sequence identifier: Q86V21_C493
  MOD_RES (18)..(18): May or may not be conjugated to a chemical probe
KAVWGESGELVCTKPIPCQPTHFWNDENGNKY

SEQ ID NO: 4793 - protein, 33 aa, Homo sapiens
  Table 3 sequence identifier: Q96GX5_C251
  MOD_RES (25)..(25): May or may not be conjugated to a chemical probe
KNQDPANILSACLSETSQLSQGLVCPMSVDQKD

SEQ ID NO: 4794 - protein, 24 aa, Homo sapiens
  Table 3 sequence identifier: Q96GX5_C614
  MOD_RES (20)..(20): May or may not be conjugated to a chemical probe
KESSFEESNIEDPLIVTPDCQEKT

SEQ ID NO: 4795 - protein, 15 aa, Homo sapiens
  Table 3 sequence identifier: O60493_C140
  MOD_RES (2)..(2): May or may not be conjugated to a chemical probe
RCLHMFLQDEIIDKS

SEQ ID NO: 4796 - protein, 12 aa, Homo sapiens
  Table 3 sequence identifier: P29279_C120
  MOD_RES (10)..(10): May or may not be conjugated to a chemical probe
RSGESFQSSCKY

SEQ ID NO: 4797 - protein, 33 aa, Homo sapiens
  Table 3 sequence identifier: P49790_C585
  MOD_RES (31)..(31): May or may not be conjugated to a chemical probe
KTAELSGSSSTLEPIISSSAHHVTTVNSTNCKK

SEQ ID NO: 4798 - protein, 16 aa, Homo sapiens
  Table 3 sequence identifier: P49790_C753
  MOD_RES (13)..(13): May or may not be conjugated to a chemical probe
KCVACETPKPGTCVKR

SEQ ID NO: 4799 - protein, 25 aa, Homo sapiens
  Table 3 sequence identifier: P51114_C99
  MOD_RES (12)..(12): May or may not be conjugated to a chemical probe
KGEFYVIEYAACDATYNEIVTFERL

SEQ ID NO: 4800 - protein, 20 aa, Homo sapiens
  Table 3 sequence identifier: Q15170_C88
  MOD_RES (15)..(15): May or may not be conjugated to a chemical probe
KDLFEGRPPMEQPPCGVGKH

SEQ ID NO: 4801 - protein, 19 aa, Homo sapiens
  Table 3 sequence identifier: Q8IY18_C229
  MOD_RES (9)..(9): May or may not be conjugated to a chemical probe
KEKQLETSCKEKTEYLQKM

SEQ ID NO: 4802 - protein, 22 aa, Homo sapiens
  Table 3 sequence identifier: P62979_C126
  MOD_RES (9)..(9): May or may not be conjugated to a chemical probe
RRECPSDECGAGVFMASHFDRH

SEQ ID NO: 4803 - protein, 28 aa, Homo sapiens
  Table 3 sequence identifier: Q9BSJ8_C635
  MOD_RES (12)..(12): May or may not be conjugated to a chemical probe
RGSSVDAPPRPCHTTPDSQFGTEHVLRI

SEQ ID NO: 4804 - protein, 32 aa, Homo sapiens
  Table 3 sequence identifier: P35658_C399
  MOD_RES (19)..(19): May or may not be conjugated to a chemical probe
KTLPPAPVLMLLSTDGVLCPFYMINQNPGVKS

SEQ ID NO: 4805 - protein, 8 aa, Homo sapiens
  Table 3 sequence identifier: P27694_C200
  MOD_RES (5)..(5): May or may not be conjugated to a chemical probe
KWTICARV

SEQ ID NO: 4806 - protein, 11 aa, Homo sapiens
  Table 3 sequence identifier: P27694_C503
  MOD_RES (2)..(2): May or may not be conjugated to a chemical probe
KCDTEFPNFKY

SEQ ID NO: 4807 - protein, 18 aa, Homo sapiens
  Table 3 sequence identifier: P46013_C1843
  MOD_RES (8)..(8): May or may not be conjugated to a chemical probe
RELFQTPCTDNPTTDEKT

SEQ ID NO: 4808 - protein, 38 aa, Homo sapiens
  Table 3 sequence identifier: P17858_C212
  MOD_RES (3)..(3): May or may not be conjugated to a chemical probe
RHCGYLALVSALASGADWLFIPEAPPEDGWENFMCERL

SEQ ID NO: 4809 - protein, 15 aa, Homo sapiens
  Table 3 sequence identifier: Q14353_C220
  MOD_RES (13)..(13): May or may not be conjugated to a chemical probe
RTEVMALVPPADCRY

SEQ ID NO: 4810 - protein, 27 aa, Homo sapiens
  Table 3 sequence identifier: Q7Z5J4_C239
  MOD_RES (3)..(3): May or may not be conjugated to a chemical probe
KSCTAPTAQPHDRPLTASSSLAPGQRV

SEQ ID NO: 4811 - protein, 35 aa, Homo sapiens
  Table 3 sequence identifier: O75083_C438
  MOD_RES (2)..(2): May or may not be conjugated to a chemical probe
KCFSIDNPGYEPEVVAVHPGGDTVAIGGVDGNVRL

SEQ ID NO: 4812 - protein, 13 aa, Homo sapiens
  Table 3 sequence identifier: Q8WXH0_C553
  MOD_RES (7)..(7): May or may not be conjugated to a chemical probe
KNLAGECQNINKQ

SEQ ID NO: 4813 - protein, 33 aa, Homo sapiens
  Table 3 sequence identifier: Q14137_C469
  MOD_RES (12)..(12): May or may not be conjugated to a chemical probe
KSVAWNPSPAVCLVAAAVEDSVLLLNPALGDRL

SEQ ID NO: 4814 - protein, 22 aa, Homo sapiens
  Table 3 sequence identifier: Q8N4X5_C781
  MOD_RES (11)..(11): May or may not be conjugated to a chemical probe
KAVTPASAPDCTPVNSATTLKN

SEQ ID NO: 4815 - protein, 15 aa, Homo sapiens
  Table 3 sequence identifier: P52732_C773
  MOD_RES (3)..(3): May or may not be conjugated to a chemical probe
KFCADSDGFSQELRN

SEQ ID NO: 4816 - protein, 10 aa, Homo sapiens
  Table 3 sequence identifier: Q7Z6Z7_C1879
  MOD_RES (8)..(8): May or may not be conjugated to a chemical probe
RVLGPAACRN

SEQ ID NO: 4817 - protein, 22 aa, Homo sapiens
  Table 3 sequence identifier: Q7Z6Z7_C4099
  MOD_RES (12)..(12): May or may not be conjugated to a chemical probe
RVTYTINPSSHCNPNHLSYFKF

SEQ ID NO: 4818 - protein, 18 aa, Homo sapiens
  Table 3 sequence identifier: P11216_C496
  MOD_RES (6)..(6): May or may not be conjugated to a chemical probe
RWLLLCNPGLADTIVEKI

SEQ ID NO: 4819 - protein, 10 aa, Homo sapiens
  Table 3 sequence identifier: Q16514_C143
  MOD_RES (3)..(3): May or may not be conjugated to a chemical probe
KACTTEAHKQ

SEQ ID NO: 4820 - protein, 16 aa, Homo sapiens
  Table 3 sequence identifier: Q9H3P2_C471
  MOD_RES (5)..(5): May or may not be conjugated to a chemical probe
RENPCQEQGDVIQIKL

SEQ ID NO: 4821 - protein, 19 aa, Homo sapiens
  Table 3 sequence identifier: Q9UFC0_C88
  MOD_RES (14)..(14): May or may not be conjugated to a chemical probe
RCANNQLGDVTALCQFPKL

SEQ ID NO: 4822 - protein, 27 aa, Homo sapiens
  Table 3 sequence identifier: Q9UFC0_C249
  MOD_RES (3)..(3): May or may not be conjugated to a chemical probe
RACASPSAQVEGSPVAGSDGSQPAVKL

SEQ ID NO: 4823 - protein, 15 aa, Homo sapiens
  Table 3 sequence identifier: Q96RR4_C223
  MOD_RES (10)..(10): May or may not be conjugated to a chemical probe
RGTRPAPGGCIQPRG

SEQ ID NO: 4824 - protein, 17 aa, Homo sapiens
  Table 3 sequence identifier: Q9UJU6_C97
  MOD_RES (4)..(4): May or may not be conjugated to a chemical probe
KGACASHVSTMASFLKG

SEQ ID NO: 4825 - protein, 36 aa, Homo sapiens
  Table 3 sequence identifier: Q9NYZ3_C45
  MOD_RES (2)..(2): May or may not be conjugated to a chemical probe
RCIAASLELNNPVPEQPPLPTSESPFAWSPLAGEKF

SEQ ID NO: 4826 - protein, 21 aa, Homo sapiens
  Table 3 sequence identifier: Q9ULI3_C1360
  MOD_RES (4)..(4): May or may not be conjugated to a chemical probe
RHSCIFPGQYNPSFISDESRR

SEQ ID NO: 4827 - protein, 17 aa, Homo sapiens
  Table 3 sequence identifier: P38606_C277
  MOD_RES (13)..(13): May or may not be conjugated to a chemical probe
KYSNSDVIIYVGCGERG

SEQ ID NO: 4828 - protein, 14 aa, Homo sapiens
  Table 3 sequence identifier: Q9UPQ0_C333
  MOD_RES (2)..(2): May or may not be conjugated to a chemical probe
RCEEEAAVQPHSRA

SEQ ID NO: 4829 - protein, 11 aa, Homo sapiens
  Table 3 sequence identifier: Q7L2H7_C125
  MOD_RES (6)..(6): May or may not be conjugated to a chemical probe
RYTVYCSLIKV

SEQ ID NO: 4830 - protein, 30 aa, Homo sapiens
  Table 3 sequence identifier: Q9BPX3_C177
  MOD_RES (10)..(10): May or may not be conjugated to a chemical probe
RLQDPKDDECPVVNAYATLIENDSNPEVRR

SEQ ID NO: 4831 - protein, 19 aa, Homo sapiens
  Table 3 sequence identifier: O95757_C540
  MOD_RES (2)..(2): May or may not be conjugated to a chemical probe
KCHAEHTPEEEIDHTGAKT

SEQ ID NO: 4832 - protein, 14 aa, Homo sapiens
  Table 3 sequence identifier: O95757_C589
  MOD_RES (12)..(12): May or may not be conjugated to a chemical probe
KSIDLPIQSSLCRQ

SEQ ID NO: 4833 - protein, 24 aa, Homo sapiens
  Table 3 sequence identifier: Q9BWH6_C195
  MOD_RES (5)..(5): May or may not be conjugated to a chemical probe
RNQGCQLPGSSHSFQGPNLVTGKG

SEQ ID NO: 4834 - protein, 14 aa, Homo sapiens
  Table 3 sequence identifier: Q8NHV4_C314
  MOD_RES (3)..(3): May or may not be conjugated to a chemical probe
KGCSNKPTTVNKRS

SEQ ID NO: 4835 - protein, 24 aa, Homo sapiens
  Table 3 sequence identifier: Q9UJV9_C568
  MOD_RES (11)..(11): May or may not be conjugated to a chemical probe
KVPPVLQVLHCGDESMLDIGGERG

SEQ ID NO: 4836 - protein, 17 aa, Homo sapiens
  Table 3 sequence identifier: P13010_C157
  MOD_RES (2)..(2): May or may not be conjugated to a chemical probe
KCDISLQFFLPFSLGKE

SEQ ID NO: 4837 - protein, 31 aa, Homo sapiens
  Table 3 sequence identifier: O95340_C202
  MOD_RES (10)..(10): May or may not be conjugated to a chemical probe
KTNLSTVSDCVHQVVELLQEQNIVPYTIIKD

SEQ ID NO: 4838 - protein, 12 aa, Homo sapiens
  Table 3 sequence identifier: Q5JZ73_C9
  MOD_RES (4)..(4): May or may not be conjugated to a chemical probe
REACDMGVLFKE

SEQ ID NO: 4839 - protein, 31 aa, Homo sapiens
  Table 3 sequence identifier: Q6DN90_C214
  MOD_RES (20)..(20): May or may not be conjugated to a chemical probe
KQVSVTNDGSQLGALVSPECGDLSEPTTLKS

SEQ ID NO: 4840 - protein, 19 aa, Homo sapiens
  Table 3 sequence identifier: Q9BZE9_C127
  MOD_RES (3)..(3): May or may not be conjugated to a chemical probe
RECLQHPGGATPVCVYTRD

SEQ ID NO: 4841 - protein, 11 aa, Homo sapiens
  Table 3 sequence identifier: O95294_C386
  MOD_RES (9)..(9): May or may not be conjugated to a chemical probe
KKYMELDPCKM

SEQ ID NO: 4842 - protein, 19 aa, Homo sapiens
  Table 3 sequence identifier: O95294_C534
  MOD_RES (15)..(15): May or may not be conjugated to a chemical probe
KELWMAPLHPFLLQCVSRV

SEQ ID NO: 4843 - protein, 19 aa, Homo sapiens
  Table 3 sequence identifier: P06737_C496
  MOD_RES (7)..(7): May or may not be conjugated to a chemical probe
RRWLLLCNPGLAELIAEKI

SEQ ID NO: 4844 - protein, 10 aa, Homo sapiens
  Table 3 sequence identifier: Q92616_C1482
  MOD_RES (7)..(7): May or may not be conjugated to a chemical probe
REAADDCAKA

SEQ ID NO: 4845 - protein, 9 aa, Homo sapiens
  Table 3 sequence identifier: Q9Y6I9_C165
  MOD_RES (4)..(4): May or may not be conjugated to a chemical probe
RKLCAYPRL

SEQ ID NO: 4846 - protein, 19 aa, Homo sapiens
  Table 3 sequence identifier: Q99996_C1966
  MOD_RES (14)..(14): May or may not be conjugated to a chemical probe
KTDIIDRLEQELLCASNRL

SEQ ID NO: 4847 - protein, 27 aa, Homo sapiens
  Table 3 sequence identifier: Q6UB99_C2640
  MOD_RES (4)..(4): May or may not be conjugated to a chemical probe
KSLCVNEVPSFYVPMVDVNDDFVLLPA

SEQ ID NO: 4848 - protein, 20 aa, Homo sapiens
  Table 3 sequence identifier: Q9NRV9_C168
  MOD_RES (7)..(7): May or may not be conjugated to a chemical probe
RGDIYFCTGYDPPMKPYGRR

SEQ ID NO: 4849 - protein, 26 aa, Homo sapiens
  Table 3 sequence identifier: Q6ZUT6_C437
  MOD_RES (5)..(5): May or may not be conjugated to a chemical probe
RESGCVLGLRPGAQESPVSWPEGSKQ

SEQ ID NO: 4850 - protein, 15 aa, Homo sapiens
  Table 3 sequence identifier: P15407_C172
  MOD_RES (13)..(13): May or may not be conjugated to a chemical probe
RLELVLEAHRPICKI

SEQ ID NO: 4851 - protein, 20 aa, Homo sapiens
  Table 3 sequence identifier: Q9BYG3_C237
  MOD_RES (12)..(12): May or may not be conjugated to a chemical probe
KTVDSQGPTPVCTPTFLERR

SEQ ID NO: 4852 - protein, 29 aa, Homo sapiens
  Table 3 sequence identifier: P49327_C496
  MOD_RES (20)..(20): May or may not be conjugated to a chemical probe
RGGPEVQQVPAGERPLWFICSGMGTQWRG

SEQ ID NO: 4853 - protein, 16 aa, Homo sapiens
  Table 3 sequence identifier: Q99436_C74
  MOD_RES (13)..(13): May or may not be conjugated to a chemical probe
RATEGMVVADKNCSKI

SEQ ID NO: 4854 - protein, 26 aa, Homo sapiens
  Table 3 sequence identifier: Q96BR1_C308
  MOD_RES (24)..(24): May or may not be conjugated to a chemical probe
RDLKPENILLDSVGHVVLTDFGLCKE

SEQ ID NO: 4855 - protein, 14 aa, Homo sapiens
  Table 3 sequence identifier: Q9GZS1_C200
  MOD_RES (5)..(5): May or may not be conjugated to a chemical probe
KMDSCIEAFGTTKQ

SEQ ID NO: 4856 - protein, 27 aa, Homo sapiens
  Table 3 sequence identifier: P41091_C269
  MOD_RES (10)..(10): May or may not be conjugated to a chemical probe
RSFDVNKPGCEVDDLKGGVAGGSILKG

SEQ ID NO: 4857 - protein, 26 aa, Homo sapiens
  Table 3 sequence identifier: Q12769_C659
  MOD_RES (23)..(23): May or may not be conjugated to a chemical probe
KAAEQILEDMITIDVENVMEDICSKL

SEQ ID NO: 4858 - protein, 21 aa, Homo sapiens
  Table 3 sequence identifier: P13489_C313
  MOD_RES (12)..(12): May or may not be conjugated to a chemical probe
RLLCETLLEPGCQLESLWVKS

SEQ ID NO: 4859 - protein, 19 aa, Homo sapiens
  Table 3 sequence identifier: Q9H5N1_C482
  MOD_RES (15)..(15): May or may not be conjugated to a chemical probe
RVQREETEVLEASLCSLRT

SEQ ID NO: 4860 - protein, 45 aa, Homo sapiens
  Table 3 sequence identifier: Q9Y2Z0_C49
  MOD_RES (9)..(9): May or may not be conjugated to a chemical probe
KPDDAQYYCQRAYCHILLGNYCVAVADAKKSLELNPNNSTAMLRK

SEQ ID NO: 4861 - protein, 15 aa, Homo sapiens
  Table 3 sequence identifier: P48444_C441
  MOD_RES (7)..(7): May or may not be conjugated to a chemical probe
RNTLEWCLPVIDAKN

SEQ ID NO: 4862 - protein, 24 aa, Homo sapiens
  Table 3 sequence identifier: Q12888_C1375
  MOD_RES (12)..(12): May or may not be conjugated to a chemical probe
RKGVSQTGTPVCEEDGDAGLGIRQ

SEQ ID NO: 4863 - protein, 45 aa, Homo sapiens
  Table 3 sequence identifier: P14921_C112
  MOD_RES (22)..(22): May or may not be conjugated to a chemical probe
KGVDFQKFCMNGAALCALGKDCFLELAPDFVGDILWEHLEILQKE

SEQ ID NO: 4864 - protein, 38 aa, Homo sapiens
  Table 3 sequence identifier: Q5JTZ9_C443
  MOD_RES (20)..(20): May or may not be conjugated to a chemical probe
RTLGPSDMFPAEVAWSLSLCGDLGLPLDMVELMLEEKG

SEQ ID NO: 4865 - protein, 22 aa, Homo sapiens
  Table 3 sequence identifier: Q92990_C406
  MOD_RES (2)..(2): May or may not be conjugated to a chemical probe
RCLLNTSNHSGVEAFIIQNIKN

SEQ ID NO: 4866 - protein, 11 aa, Homo sapiens
  Table 3 sequence identifier: Q9P0J1_C132
  MOD_RES (6)..(6): May or may not be conjugated to a chemical probe
RSAATCLQTRG

SEQ ID NO: 4867 - protein, 12 aa, Homo sapiens
  Table 3 sequence identifier: Q8NBJ5_C369
  MOD_RES (10)..(10): May or may not be conjugated to a chemical probe
RALQAQEIECRL

SEQ ID NO: 4868 - protein, 37 aa, Homo sapiens
  Table 3 sequence identifier: P01591_C94
  MOD_RES (2)..(2): May or may not be conjugated to a chemical probe
KCDPTEVELDNQIVTATQSNICDEDSATETCYTYDRN

SEQ ID NO: 4869 - protein, 11 aa, Homo sapiens
  Table 3 sequence identifier: Q96QR8_C238
  MOD_RES (8)..(8): May or may not be conjugated to a chemical probe
RFFFDVGCNKY

SEQ ID NO: 4870 - protein, 25 aa, Homo sapiens
  Table 3 sequence identifier: Q99832_C326
  MOD_RES (6)..(6): May or may not be conjugated to a chemical probe
RTMMACGGSIQTSVNALSADVLGRC

SEQ ID NO: 4871 - protein, 13 aa, Homo sapiens
  Table 3 sequence identifier: O95218_C71
  MOD_RES (11)..(11): May or may not be conjugated to a chemical probe
RGLFSANDWQCKT

SEQ ID NO: 4872 - protein, 20 aa, Homo sapiens
  Table 3 sequence identifier: O43237_C191
  MOD_RES (13)..(13): May or may not be conjugated to a chemical probe
KDFQDYMEPEEGCQGSPQRR

SEQ ID NO: 4873 - protein, 10 aa, Homo sapiens
  Table 3 sequence identifier: Q92576_C276
  MOD_RES (8)..(8): May or may not be conjugated to a chemical probe
KNEALMECKA

SEQ ID NO: 4874 - protein, 27 aa, Homo sapiens
  Table 3 sequence identifier: Q9HAU0_C473
  MOD_RES (6)..(6): May or may not be conjugated to a chemical probe
RPESICSVTPSTHDKTLGPGAEEKRRS

SEQ ID NO: 4875 - protein, 35 aa, Homo sapiens
  Table 3 sequence identifier: O95425_C76
  MOD_RES (3)..(3): May or may not be conjugated to a chemical probe
KYCTETSGVHGDSPYGSGTMDTHSLESKAERIARY

SEQ ID NO: 4876 - protein, 25 aa, Homo sapiens
  Table 3 sequence identifier: Q8TD30_C158
  MOD_RES (22)..(22): May or may not be conjugated to a chemical probe
RILQACGGNSLGSYSASQGVNCIRE

SEQ ID NO: 4877 - protein, 11 aa, Homo sapiens
  Table 3 sequence identifier: Q8TD30_C347
  MOD_RES (7)..(7): May or may not be conjugated to a chemical probe
KGYMGECGYRG

SEQ ID NO: 4878 - protein, 24 aa, Homo sapiens
  Table 3 sequence identifier: Q14790_C409
  MOD_RES (19)..(19): May or may not be conjugated to a chemical probe
RYIPDEADFLLGMATVNNCVSYRN

SEQ ID NO: 4879 - protein, 44 aa, Homo sapiens
  Table 3 sequence identifier: P09211_C170
  MOD_RES (30)..(30): May or may not be conjugated to a chemical probe
KTFIVGDQISFADYNLLDLLLIHEVLAPGCLDAFPLLSAYVGRL

SEQ ID NO: 4880 - protein, 27 aa, Homo sapiens
  Table 3 sequence identifier: Q03519_C641
  MOD_RES (16)..(16): May or may not be conjugated to a chemical probe
RVLILDEATSALDVQCEQALQDWNSRG

SEQ ID NO: 4881 - protein, 20 aa, Homo sapiens
  Table 3 sequence identifier: Q9ULW0_C462
  MOD_RES (16)..(16): May or may not be conjugated to a chemical probe
KKKTEDEHFEFHSRPCPTKI

SEQ ID NO: 4882 - protein, 18 aa, Homo sapiens
  Table 3 sequence identifier: Q16222_C251
  MOD_RES (10)..(10): May or may not be conjugated to a chemical probe
RGIWSIHVYCVDNILVKV

SEQ ID NO: 4883 - protein, 13 aa, Homo sapiens
  Table 3 sequence identifier: P61158_C408
  MOD_RES (11)..(11): May or may not be conjugated to a chemical probe
KDYEEIGPSICRH

SEQ ID NO: 4884 - protein, 38 aa, Homo sapiens
  Table 3 sequence identifier: Q6WKZ4_C318
  MOD_RES (23)..(23): May or may not be conjugated to a chemical probe
KEGLSFLGGLRSKNDVLSRSNVCINGNHVYLEQPEAKG

SEQ ID NO: 4885 - protein, 9 aa, Homo sapiens
  Table 3 sequence identifier: Q9HCE7_C725
  MOD_RES (5)..(5): May or may not be conjugated to a chemical probe
KAHTCFNRI

SEQ ID NO: 4886 - protein, 18 aa, Homo sapiens
  Table 3 sequence identifier: Q13564_C153
  MOD_RES (16)..(16): May or may not be conjugated to a chemical probe
RLADVLWNSQIPLLICRT

SEQ ID NO: 4887 - protein, 12 aa, Homo sapiens
  Table 3 sequence identifier: Q13564_C384
  MOD_RES (4)..(4): May or may not be conjugated to a chemical probe
KLLCSNSAFLRV

SEQ ID NO: 4888 - protein, 11 aa, Homo sapiens
  Table 3 sequence identifier: P31146_C24
  MOD_RES (5)..(5): May or may not be conjugated to a chemical probe
KADQCYEDVRV

SEQ ID NO: 4889 - protein, 24 aa, Homo sapiens
  Table 3 sequence identifier: Q96JM7_C169
  MOD_RES (20)..(20): May or may not be conjugated to a chemical probe
KDQKEERDVEEDNEEEDPKCSRKK

SEQ ID NO: 4890 - protein, 13 aa, Homo sapiens
  Table 3 sequence identifier: P07199_C135
  MOD_RES (7)..(7): May or may not be conjugated to a chemical probe
RHGVVSCSGVARA

SEQ ID NO: 4891 - protein, 16 aa, Homo sapiens
  Table 3 sequence identifier: O00442_C28
  MOD_RES (8)..(8): May or may not be conjugated to a chemical probe
RVSTALSCLLGLPLRV

SEQ ID NO: 4892 - protein, 16 aa, Homo sapiens
  Table 3 sequence identifier: P13639_C388
  MOD_RES (3)..(3): May or may not be conjugated to a chemical probe
KSCDPKGPLMMYISKM

SEQ ID NO: 4893 - protein, 23 aa, Homo sapiens
  Table 3 sequence identifier: Q9P0K7_C468
  MOD_RES (6)..(6): May or may not be conjugated to a chemical probe
RAELVCLNNTEISENSSDLSQKL

SEQ ID NO: 4894 - protein, 10 aa, Homo sapiens
  Table 3 sequence identifier: P35606_C276
  MOD_RES (4)..(4): May or may not be conjugated to a chemical probe
RVWCVASLRG

SEQ ID NO: 4895 - protein, 17 aa, Homo sapiens
  Table 3 sequence identifier: P46199_C290
  MOD_RES (14)..(14): May or may not be conjugated to a chemical probe
KDAQVPIILAVNKCDKA

SEQ ID NO: 4896 - protein, 13 aa, Homo sapiens
  Table 3 sequence identifier: P78527_C232
  MOD_RES (8)..(8): May or may not be conjugated to a chemical probe
KGLSSLLCNFTKS

SEQ ID NO: 4897 - protein, 11 aa, Homo sapiens
  Table 3 sequence identifier: P78527_C1455
  MOD_RES (9)..(9): May or may not be conjugated to a chemical probe
RLAAVVSACKQ

SEQ ID NO: 4898 - protein, 9 aa, Homo sapiens
  Table 3 sequence identifier: P78527_C4045
  MOD_RES (5)..(5): May or may not be conjugated to a chemical probe
RQKICYAKR

SEQ ID NO: 4899 - protein, 31 aa, Homo sapiens
  Table 3 sequence identifier: P11908_C60
  MOD_RES (12)..(12): May or may not be conjugated to a chemical probe
RGEDVYIIQSGCGEINDNLMELLIMINACKI

SEQ ID NO: 4900 - protein, 14 aa, Homo sapiens
  Table 3 sequence identifier: Q9H410_C65
  MOD_RES (6)..(6): May or may not be conjugated to a chemical probe
KKGGNCDLSHQERL

SEQ ID NO: 4901 - protein, 19 aa, Homo sapiens
  Table 3 sequence identifier: Q14498_C478
  MOD_RES (2)..(2): May or may not be conjugated to a chemical probe
KCPSIAAAIAAVNALHGRW

SEQ ID NO: 4902 - protein, 15 aa, Homo sapiens
  Table 3 sequence identifier: O75694_C1344
  MOD_RES (12)..(12): May or may not be conjugated to a chemical probe
RYVENPSQVLNCERR

SEQ ID NO: 4903 - protein, 12 aa, Homo sapiens
  Table 3 sequence identifier: Q8WU76_C79
  MOD_RES (8)..(8): May or may not be conjugated to a chemical probe
KAVFVLSCLLKG

SEQ ID NO: 4904 - protein, 15 aa, Homo sapiens
  Table 3 sequence identifier: Q8IU81_C207
  MOD_RES (5)..(5): May or may not be conjugated to a chemical probe
RNADCLAELNEAMRG

SEQ ID NO: 4905 - protein, 31 aa, Homo sapiens
  Table 3 sequence identifier: P49189_C443
  MOD_RES (11)..(11): May or may not be conjugated to a chemical probe
RVVAELQAGTCFINNYNVSPVELPFGGYKKS

SEQ ID NO: 4906 - protein, 30 aa, Homo sapiens
  Table 3 sequence identifier: Q14789_C1257
  MOD_RES (17)..(17): May or may not be conjugated to a chemical probe
RESIDGKLPSTDQQESCSSTPGLEEPLFKA

SEQ ID NO: 4907 - protein, 16 aa, Homo sapiens
  Table 3 sequence identifier: Q8N5K1_C92
  MOD_RES (12)..(12): May or may not be conjugated to a chemical probe
KVVNEINIEDLCLTKA

SEQ ID NO: 4908 - protein, 27 aa, Homo sapiens
  Table 3 sequence identifier: O43592_C693
  MOD_RES (22)..(22): May or may not be conjugated to a chemical probe
KQCGCSEVYLDCLQTFLPALSCPLQKD

SEQ ID NO: 4909 - protein, 33 aa, Homo sapiens
  Table 3 sequence identifier: O43374_C302
  MOD_RES (22)..(22): May or may not be conjugated to a chemical probe
KLGMQGPGQLIPLIEETTSTECRQDVATNLLKL

SEQ ID NO: 4910 - protein, 15 aa, Homo sapiens
  Table 3 sequence identifier: O43374_C657
  MOD_RES (2)..(2): May or may not be conjugated to a chemical probe
KCVNELNQWLSALRK

SEQ ID NO: 4911 - protein, 19 aa, Homo sapiens
  Table 3 sequence identifier: Q9NUQ3_C480
  MOD_RES (11)..(11): May or may not be conjugated to a chemical probe
RDLATPVMQPCTALDSHKE

SEQ ID NO: 4912 - protein, 8 aa, Homo sapiens
  Table 3 sequence identifier: P63104_C189
  MOD_RES (3)..(3): May or may not be conjugated to a chemical probe
KACSLAKT

SEQ ID NO: 4913 - protein, 13 aa, Homo sapiens
  Table 3 sequence identifier: O60216_C392
  MOD_RES (2)..(2): May or may not be conjugated to a chemical probe
RCLTPLVPEDLRK

SEQ ID NO: 4914 - protein, 10 aa, Homo sapiens
  Table 3 sequence identifier: Q8N3U4_C869
  MOD_RES (8)..(8): May or may not be conjugated to a chemical probe
RNLLAAFCKL

SEQ ID NO: 4915 - protein, 36 aa, Homo sapiens
  Table 3 sequence identifier: Q9ULV4_C283
  MOD_RES (33)..(33): May or may not be conjugated to a chemical probe
KNMQEPIALHEMDTSNGVLLPFYDPDTSIIYLCGKG

SEQ ID NO: 4916 - protein, 15 aa, Homo sapiens
  Table 3 sequence identifier: P61160_C221
  MOD_RES (3)..(3): May or may not be conjugated to a chemical probe
KLCYVGYNIEQEQKL

SEQ ID NO: 4917 - protein, 10 aa, Homo sapiens
  Table 3 sequence identifier: Q12904_C161
  MOD_RES (4)..(4): May or may not be conjugated to a chemical probe
RIGCIITARK

SEQ ID NO: 4918 - protein, 18 aa, Homo sapiens
  Table 3 sequence identifier: Q9H9P8_C187
  MOD_RES (8)..(8): May or may not be conjugated to a chemical probe
RGLMAIDCPHTGIVDYRQ

SEQ ID NO: 4919 - protein, 14 aa, Homo sapiens
  Table 3 sequence identifier: Q7Z2W4_C272
  MOD_RES (3)..(3): May or may not be conjugated to a chemical probe
RSCTPSPDQISHRA

SEQ ID NO: 4920 - protein, 15 aa, Homo sapiens
  Table 3 sequence identifier: P30153_C148
  MOD_RES (5)..(5): May or may not be conjugated to a chemical probe
RTSACGLFSVCYPRV

SEQ ID NO: 4921 - protein, 11 aa, Homo sapiens
  Table 3 sequence identifier: Q92797_C969
  MOD_RES (6)..(6): May or may not be conjugated to a chemical probe
KATNLCFAERN

SEQ ID NO: 4922 - protein, 11 aa, Homo sapiens
  Table 3 sequence identifier: Q9Y3B7_C50
  MOD_RES (9)..(9): May or may not be conjugated to a chemical probe
RGVSINQFCKE

SEQ ID NO: 4923 - protein, 25 aa, Homo sapiens
  Table 3 sequence identifier: Q9BV44_C391
  MOD_RES (19)..(19): May or may not be conjugated to a chemical probe
KEGKPSWGLPIDAVQWDICNLPLRT

SEQ ID NO: 4924 - protein, 45 aa, Homo sapiens
  Table 3 sequence identifier: O14578_C402
  MOD_RES (23)..(23): May or may not be conjugated to a chemical probe
KSDDDTSNFDEPEKNSWVSSSPCQLSPSGFSGEELPFVGFSYSKA

SEQ ID NO: 4925 - protein, 18 aa, Homo sapiens
  Table 3 sequence identifier: Q9NVU0_C70
  MOD_RES (16)..(16): May or may not be conjugated to a chemical probe
KVELEMAIDTLNPNYCRS

SEQ ID NO: 4926 - protein, 19 aa, Homo sapiens
  Table 3 sequence identifier: Q92947_C115
  MOD_RES (5)..(5): May or may not be conjugated to a chemical probe
KGYGCAGVSSVAYGLLARE

SEQ ID NO: 4927 - protein, 43 aa, Homo sapiens
  Table 3 sequence identifier: Q6PJ69_C320
  MOD_RES (39)..(39): May or may not be conjugated to a chemical probe
RLCGLLLEEGSHPGAPAKPVDLAPVEAPGPLAPVPSTVCPLRR

SEQ ID NO: 4928 - protein, 10 aa, Homo sapiens
  Table 3 sequence identifier: Q15027_C501
  MOD_RES (7)..(7): May or may not be conjugated to a chemical probe
KKPGPSCSRQ

SEQ ID NO: 4929 - protein, 16 aa, Homo sapiens
  Table 3 sequence identifier: Q15020_C341
  MOD_RES (7)..(7): May or may not be conjugated to a chemical probe
RALVENCLVPDLWIRY

SEQ ID NO: 4930 - protein, 27 aa, Homo sapiens
  Table 3 sequence identifier: Q9Y6J9_C41
  MOD_RES (24)..(24): May or may not be conjugated to a chemical probe
RLMAESTGLELSDEVAALLAEDVCYRL

SEQ ID NO: 4931 - protein, 14 aa, Homo sapiens
  Table 3 sequence identifier: P17812_C216
  MOD_RES (12)..(12): May or may not be conjugated to a chemical probe
RGLGLSPDLVVCRC

SEQ ID NO: 4932 - protein, 14 aa, Homo sapiens
  Table 3 sequence identifier: Q96GG9_C29
  MOD_RES (6)..(6): May or may not be conjugated to a chemical probe
KTAVSCLSQNDWKL

SEQ ID NO: 4933 - protein, 13 aa, Homo sapiens
  Table 3 sequence identifier: Q14315_C1448
  MOD_RES (2)..(2): May or may not be conjugated to a chemical probe
KCSGPGLGAGVRA

SEQ ID NO: 4934 - protein, 38 aa, Homo sapiens
  Table 3 sequence identifier: Q9NSP4_C40
  MOD_RES (32)..(32): May or may not be conjugated to a chemical probe
KLPGLNTATILLVGTEDALLQQLADSMLKEDCASELKV

SEQ ID NO: 4935 - protein, 16 aa, Homo sapiens
  Table 3 sequence identifier: Q9Y3B2_C40
  MOD_RES (12)..(12): May or may not be conjugated to a chemical probe
RHGYIFSSLAGCLMKS

SEQ ID NO: 4936 - protein, 16 aa, Homo sapiens
  Table 3 sequence identifier: Q9H4K7_C206
  MOD_RES (6)..(6): May or may not be conjugated to a chemical probe
RAPVTCTPGQPGQQRV

SEQ ID NO: 4937 - protein, 35 aa, Homo sapiens
  Table 3 sequence identifier: P62140_C201
  MOD_RES (15)..(15): May or may not be conjugated to a chemical probe
RIMRPTDVPDTGLLCDLLWSDPDKDVQGWGENDRG

SEQ ID NO: 4938 - protein, 22 aa, Homo sapiens
  Table 3 sequence identifier: Q9H063_C133
  MOD_RES (14)..(14): May or may not be conjugated to a chemical probe
REPSLSWVVNAVNCSLFSAVRE

SEQ ID NO: 4939 - protein, 12 aa, Homo sapiens
  Table 3 sequence identifier: P23434_C138
  MOD_RES (3)..(3): May or may not be conjugated to a chemical probe
KSCYEDGWLIKM

SEQ ID NO: 4940 - protein, 18 aa, Homo sapiens
  Table 3 sequence identifier: Q5JPH6_C386
  MOD_RES (12)..(12): May or may not be conjugated to a chemical probe
KLQVLVEEAFGCQLQNRD

SEQ ID NO: 4941 - protein, 21 aa, Homo sapiens
  Table 3 sequence identifier: O14976_C1142
  MOD_RES (3)..(3): May or may not be conjugated to a chemical probe
KACTQPRPNYASNFSVIGARE

SEQ ID NO: 4942 - protein, 8 aa, Homo sapiens
  Table 3 sequence identifier: O14974_C553
  MOD_RES (3)..(3): May or may not be conjugated to a chemical probe
KSCSFGRR

SEQ ID NO: 4943 - protein, 11 aa, Homo sapiens
  Table 3 sequence identifier: Q9H9A6_C438
  MOD_RES (5)..(5): May or may not be conjugated to a chemical probe
KNQLCEIPKRM

SEQ ID NO: 4944 - protein, 8 aa, Homo sapiens
  Table 3 sequence identifier: Q13315_C2607
  MOD_RES (4)..(4): May or may not be conjugated to a chemical probe
RIICTIRS

SEQ ID NO: 4945 - protein, 20 aa, Homo sapiens
  Table 3 sequence identifier: P51116_C270
  MOD_RES (16)..(16): May or may not be conjugated to a chemical probe
RKVPGVTAIELGEETCTFRI

SEQ ID NO: 4946 - protein, 42 aa, Homo sapiens
  Table 3 sequence identifier: Q8N3X1_C877
  MOD_RES (24)..(24): May or may not be conjugated to a chemical probe
RGMSLQSNYLGLAAAPAIMSYAECSVPIGVTAPSLQPVQARG

SEQ ID NO: 4947 - protein, 33 aa, Homo sapiens
  Table 3 sequence identifier: P36404_C153
  MOD_RES (6)..(6): May or may not be conjugated to a chemical probe
RSHHWCIQGCSAVTGENLLPGIDWLLDDISSRI

SEQ ID NO: 4948 - protein, 20 aa, Homo sapiens
  Table 3 sequence identifier: Q9HD64_C43
  MOD_RES (3)..(3): May or may not be conjugated to a chemical probe
KSCISQTPGINLDLGSGVKV

SEQ ID NO: 4949 - protein, 31 aa, Homo sapiens
  Table 3 sequence identifier: Q8NF50_C1230
  MOD_RES (21)..(21): May or may not be conjugated to a chemical probe
KIAALYLPLVGIILDALPQLCDFTVADTRRY

SEQ ID NO: 4950 - protein, 44 aa, Homo sapiens
  Table 3 sequence identifier: Q8WWM7_C628
  MOD_RES (30)..(30): May or may not be conjugated to a chemical probe
KTESVSDKEDKPPLAPSGGTEGPEQPPPPCPSQTGSPPVGLIKG

SEQ ID NO: 4951 - protein, 21 aa, Homo sapiens
  Table 3 sequence identifier: P55795_C290
  MOD_RES (16)..(16): May or may not be conjugated to a chemical probe
RYGDGGSSFQSTTGHCVHMRG

SEQ ID NO: 4952 - protein, 19 aa, Homo sapiens
  Table 3 sequence identifier: Q9BYW2_C1471
  MOD_RES (4)..(4): May or may not be conjugated to a chemical probe
KMPCYFDLIEENVYLTERK

SEQ ID NO: 4953 - protein, 30 aa, Homo sapiens
  Table 3 sequence identifier: O15143_C202
  MOD_RES (15)..(15): May or may not be conjugated to a chemical probe
KMPFGELMFESSSSCGWVHGVCFSASGSRV

SEQ ID NO: 4954 - protein, 19 aa, Homo sapiens
  Table 3 sequence identifier: O15294_C323
  MOD_RES (3)..(3): May or may not be conjugated to a chemical probe
RLCPTHADSLNNLANIKRE

SEQ ID NO: 4955 - protein, 10 aa, Homo sapiens
  Table 3 sequence identifier: Q92945_C176
  MOD_RES (8)..(8): May or may not be conjugated to a chemical probe
KIQQDSGCKV

SEQ ID NO: 4956 - protein, 22 aa, Homo sapiens
  Table 3 sequence identifier: O43847_C60
  MOD_RES (4)..(4): May or may not be conjugated to a chemical probe
KSTCSCPDLQPNGQDLGENSRV

SEQ ID NO: 4957 - protein, 23 aa, Homo sapiens
  Table 3 sequence identifier: Q9H9A5_C504
  MOD_RES (19)..(19): May or may not be conjugated to a chemical probe
KNSNQLGGNTESSESSETCSSKS

SEQ ID NO: 4958 - protein, 16 aa, Homo sapiens
  Table 3 sequence identifier: Q9H9A5_C633
  MOD_RES (6)..(6): May or may not be conjugated to a chemical probe
KRAPQCYPSSVNSART

SEQ ID NO: 4959 - protein, 11 aa, Homo sapiens
  Table 3 sequence identifier: P10155_C71
  MOD_RES (3)..(3): May or may not be conjugated to a chemical probe
RGCEVIQEIKS

SEQ ID NO: 4960 - protein, 17 aa, Homo sapiens
  Table 3 sequence identifier: P52789_C386
  MOD_RES (6)..(6): May or may not be conjugated to a chemical probe
RSASLCAATLAAVLQRI

SEQ ID NO: 4961 - protein, 19 aa, Homo sapiens
  Table 3 sequence identifier: Q01469_C43
  MOD_RES (11)..(11): May or may not be conjugated to a chemical probe
RKMGAMAKPDCIITCDGKN

SEQ ID NO: 4962 - protein, 16 aa, Homo sapiens
  Table 3 sequence identifier: P46734_C305
  MOD_RES (13)..(13): May or may not be conjugated to a chemical probe
RFSPEFVDFTAQCLRK

SEQ ID NO: 4963 - protein, 44 aa, Homo sapiens
  Table 3 sequence identifier: P35579_C511
  MOD_RES (18)..(18): May or may not be conjugated to a chemical probe
REGIEWNFIDFGLDLQPCIDLIEKPAGPPGILALLDEECWFPKA

SEQ ID NO: 4964 - protein, 15 aa, Homo sapiens
  Table 3 sequence identifier: P35579_C789
  MOD_RES (12)..(12): May or may not be conjugated to a chemical probe
KITDVIIGFQACCRG

SEQ ID NO: 4965 - protein, 9 aa, Homo sapiens
  Table 3 sequence identifier: Q9Y3C1_C36
  MOD_RES (4)..(4): May or may not be conjugated to a chemical probe
RIECSHIRH

SEQ ID NO: 4966 - protein, 14 aa, Homo sapiens
  Table 3 sequence identifier: P62888_C52
  MOD_RES (9)..(9): May or may not be conjugated to a chemical probe
KLVILANNCPALRK

SEQ ID NO: 4967 - protein, 13 aa, Homo sapiens
  Table 3 sequence identifier: Q8TAQ2_C495
  MOD_RES (8)..(8): May or may not be conjugated to a chemical probe
RNLAGDVCAIMRV

SEQ ID NO: 4968 - protein, 22 aa, Homo sapiens
  Table 3 sequence identifier: O94854_C242
  MOD_RES (15)..(15): May or may not be conjugated to a chemical probe
REQANTAVVEDGSDCLAAVLRT

SEQ ID NO: 4969 - protein, 20 aa, Homo sapiens
  Table 3 sequence identifier: P23526_C113
  MOD_RES (11)..(11): May or may not be conjugated to a chemical probe
KGETDEEYLWCIEQTLYFKD

SEQ ID NO: 4970 - protein, 32 aa, Homo sapiens
  Table 3 sequence identifier: Q6QNY1_C41
  MOD_RES (30)..(30): May or may not be conjugated to a chemical probe
RSDEPARDDAAVETAEEAKEPAEADITELCRD

SEQ ID NO: 4971 - protein, 26 aa, Homo sapiens
  Table 3 sequence identifier: Q7Z7A4_C196
  MOD_RES (22)..(22): May or may not be conjugated to a chemical probe
RLVLSWADLGPDKYLSDKDFQCLIKL

SEQ ID NO: 4972 - protein, 27 aa, Homo sapiens
  Table 3 sequence identifier: Q14699_C128
  MOD_RES (15)..(15): May or may not be conjugated to a chemical probe
KTDLHNEGYILELDCCSSLDHPTDQKL

SEQ ID NO: 4973 - protein, 26 aa, Homo sapiens
  Table 3 sequence identifier: Q14694_C254
  MOD_RES (18)..(18): May or may not be conjugated to a chemical probe
RTAGQPEGGPGADFGQSCFPAEAGRD

SEQ ID NO: 4974 - protein, 50 aa, Homo sapiens
  Table 3 sequence identifier: Q13435_C661
  MOD_RES (13)..(13): May or may not be conjugated to a chemical probe
KIPGLNSPIPESCSFGYHAGGWGKPPVDETGKPLYGDVFGTNAAEFQTKT

SEQ ID NO: 4975 - protein, 14 aa, Homo sapiens
  Table 3 sequence identifier: P22692_C38
  MOD_RES (2)..(2): May or may not be conjugated to a chemical probe
RCRPPVGCEELVRE

SEQ ID NO: 4976 - protein, 12 aa, Homo sapiens
  Table 3 sequence identifier: P22692_C215
  MOD_RES (3)..(3): May or may not be conjugated to a chemical probe
KQCHPALDGQRG

SEQ ID NO: 4977 - protein, 13 aa, Homo sapiens
  Table 3 sequence identifier: P60900_C161
  MOD_RES (9)..(9): May or may not be conjugated to a chemical probe
KCDPAGYYCGFKA

SEQ ID NO: 4978 - protein, 14 aa, Homo sapiens
  Table 3 sequence identifier: Q9NWY4_C17
  MOD_RES (11)..(11): May or may not be conjugated to a chemical probe
KRRPGGEGPQCEKT

SEQ ID NO: 4979 - protein, 13 aa, Homo sapiens
  Table 3 sequence identifier: P12004_C62
  MOD_RES (10)..(10): May or may not be conjugated to a chemical probe
RSEGFDTYRCDRN

SEQ ID NO: 4980 - protein, 9 aa, Homo sapiens
  Table 3 sequence identifier: O00148_C238
  MOD_RES (7)..(7): May or may not be conjugated to a chemical probe
KDIRPVCRK

SEQ ID NO: 4981 - protein, 14 aa, Homo sapiens
  Table 3 sequence identifier: Q9BW19_C144
  MOD_RES (5)..(5): May or may not be conjugated to a chemical probe
KGQLCDLNAELKRC

SEQ ID NO: 4982 - protein, 20 aa, Homo sapiens
  Table 3 sequence identifier: Q9BW19_C557
  MOD_RES (5)..(5): May or may not be conjugated to a chemical probe
RGLQCGAPLSLVDLAGSERL

SEQ ID NO: 4983 - protein, 17 aa, Homo sapiens
  Table 3 sequence identifier: Q15477_C247
  MOD_RES (10)..(10): May or may not be conjugated to a chemical probe
RGDTVSASPCSAPLARA

SEQ ID NO: 4984 - protein, 8 aa, Homo sapiens
  Table 3 sequence identifier: Q9NQ89_C9
  MOD_RES (5)..(5): May or may not be conjugated to a chemical probe
RERFCNRE

SEQ ID NO: 4985 - protein, 15 aa, Homo sapiens
  Table 3 sequence identifier: Q9Y2R9_C152
  MOD_RES (3)..(3): May or may not be conjugated to a chemical probe
KNCEPMIGLVPILKG

SEQ ID NO: 4986 - protein, 15 aa, Homo sapiens
  Table 3 sequence identifier: Q12933_C287
  MOD_RES (10)..(10): May or may not be conjugated to a chemical probe
KTATFENIVCVLNRE

SEQ ID NO: 4987 - protein, 12 aa, Homo sapiens
  Table 3 sequence identifier: Q12931_C501
  MOD_RES (7)..(7): May or may not be conjugated to a chemical probe
RNIYYLCAPNRH

SEQ ID NO: 4988 - protein, 14 aa, Homo sapiens
  Table 3 sequence identifier: Q9NQS1_C251
  MOD_RES (7)..(7): May or may not be conjugated to a chemical probe
KSVAAGCPVLLGKD

SEQ ID NO: 4989 - protein, 14 aa, Homo sapiens
  Table 3 sequence identifier: Q9UBB4_C134
  MOD_RES (2)..(2): May or may not be conjugated to a chemical probe
RCGLQFLGNIASRN

SEQ ID NO: 4990 - protein, 10 aa, Homo sapiens
  Table 3 sequence identifier: Q9UBB4_C382
  MOD_RES (7)..(7): May or may not be conjugated to a chemical probe
RLIGNLCYKN

SEQ ID NO: 4991 - protein, 28 aa, Homo sapiens
  Table 3 sequence identifier: Q9C0C9_C910
  MOD_RES (12)..(12): May or may not be conjugated to a chemical probe
KAEWPSETPVLCQQCGGKPGVTFTSAKG

SEQ ID NO: 4992 - protein, 16 aa, Homo sapiens
  Table 3 sequence identifier: Q9BTW9_C234
  MOD_RES (11)..(11): May or may not be conjugated to a chemical probe
KMAEFLDWSLCNLARS

SEQ ID NO: 4993 - protein, 14 aa, Homo sapiens
  Table 3 sequence identifier: Q9Y520_C2340
  MOD_RES (12)..(12): May or may not be conjugated to a chemical probe
KSTTTSDPPNICKV

SEQ ID NO: 4994 - protein, 17 aa, Homo sapiens
  Table 3 sequence identifier: O75533_C933
  MOD_RES (10)..(10): May or may not be conjugated to a chemical probe
RVKPYLPQICGTVLWRL

SEQ ID NO: 4995 - protein, 12 aa, Homo sapiens
  Table 3 sequence identifier: O75533_C1059
  MOD_RES (3)..(3): May or may not be conjugated to a chemical probe
RICFELLELLKA

SEQ ID NO: 4996 - protein, 11 aa, Homo sapiens
  Table 3 sequence identifier: Q96BD8_C29
  MOD_RES (3)..(3): May or may not be conjugated to a chemical probe
RNCGQEPTLKT

SEQ ID NO: 4997 - protein, 32 aa, Homo sapiens
  Table 3 sequence identifier: Q14192_C28
  MOD_RES (7)..(7): May or may not be conjugated to a chemical probe
REESPYCVVCFETLFANTCEECGKPIGCDCKD

SEQ ID NO: 4998 - protein, 15 aa, Homo sapiens
  Table 3 sequence identifier: Q14192_C129
  MOD_RES (12)..(12): May or may not be conjugated to a chemical probe
KGSSWHETCFICHRC

SEQ ID NO: 4999 - protein, 37 aa, Homo sapiens
  Table 3 sequence identifier: Q92844_C328
  MOD_RES (4)..(4): May or may not be conjugated to a chemical probe
RAACLPPGDHNALYVNSFPLLDPSDAPFPSLDSPGKA

SEQ ID NO: 5000 - protein, 16 aa, Homo sapiens
  Table 3 sequence identifier: Q9Y4H4_C116
  MOD_RES (13)..(13): May or may not be conjugated to a chemical probe
REQLYSTILSHQCQRM

SEQ ID NO: 5001 - protein, 25 aa, Homo sapiens
  Table 3 sequence identifier: P30154_C389
  MOD_RES (20)..(20): May or may not be conjugated to a chemical probe
KENTIEHLLPLFLAQLKDECPDVRL

SEQ ID NO: 5002 - protein, 15 aa, Homo sapiens
  Table 3 sequence identifier: Q9UN37_C403
  MOD_RES (8)..(8): May or may not be conjugated to a chemical probe
KLLEPVVCMSDMLRS

SEQ ID NO: 5003 - protein, 20 aa, Homo sapiens
  Table 3 sequence identifier: Q96RL1_C121
  MOD_RES (10)..(10): May or may not be conjugated to a chemical probe
KAIAESLNSCRPSDASATRS

SEQ ID NO: 5004 - protein, 39 aa, Homo sapiens
  Table 3 sequence identifier: Q8WZA9_C443
  MOD_RES (34)..(34): May or may not be conjugated to a chemical probe
RAAALSPEDETWEVLEEAPPPVFPLRPGGLPGLCEWLRR

SEQ ID NO: 5005 - protein, 17 aa, Homo sapiens
  Table 3 sequence identifier: Q8IZT6_C51
  MOD_RES (6)..(6): May or may not be conjugated to a chemical probe
RSPFLCFGDVLLGASRT

SEQ ID NO: 5006 - protein, 26 aa, Homo sapiens
  Table 3 sequence identifier: P11586_C408
  MOD_RES (23)..(23): May or may not be conjugated to a chemical probe
KSTTTIGLVQALGAHLYQNVFACVRQ

SEQ ID NO: 5007 - protein, 18 aa, Homo sapiens
  Table 3 sequence identifier: P11586_C691
  MOD_RES (6)..(6): May or may not be conjugated to a chemical probe
RYSGLCPHVVVLVATVRA

SEQ ID NO: 5008 - protein, 11 aa, Homo sapiens
  Table 3 sequence identifier: P11586_C785
  MOD_RES (2)..(2): May or may not be conjugated to a chemical probe
KCTHWAEGGKG

SEQ ID NO: 5009 - protein, 11 aa, Homo sapiens
  Table 3 sequence identifier: P21912_C243
  MOD_RES (2)..(2): May or may not be conjugated to a chemical probe
RCHTIMNCTRT

SEQ ID NO: 5010 - protein, 10 aa, Homo sapiens
  Table 3 sequence identifier: Q99471_C49
  MOD_RES (3)..(3): May or may not be conjugated to a chemical probe
KDCLNVLNKS

SEQ ID NO: 5011 - protein, 33 aa, Homo sapiens
  Table 3 sequence identifier: P48735_C336
  MOD_RES (28)..(28): May or may not be conjugated to a chemical probe
KNYDGDVQSDILAQGFGSLGLMTSVLVCPDGKT

SEQ ID NO: 5012 - protein, 37 aa, Homo sapiens
  Table 3 sequence identifier: Q9UJM3_C430
  MOD_RES (22)..(22): May or may not be conjugated to a chemical probe
KFFREAEETNGGAQIQPLPADCGISSATEKPDSKTKM

SEQ ID NO: 5013 - protein, 8 aa, Homo sapiens
  Table 3 sequence identifier: Q6IA69_C627
  MOD_RES (4)..(4): May or may not be conjugated to a chemical probe
RHICTPRQ

SEQ ID NO: 5014 - protein, 17 aa, Homo sapiens
  Table 3 sequence identifier: P61221_C201
  MOD_RES (7)..(7): May or may not be conjugated to a chemical probe
KTQAIVCQQLDLTHLKE

SEQ ID NO: 5015 - protein, 33 aa, Homo sapiens
  Table 3 sequence identifier: Q7L1V2_C326
  MOD_RES (29)..(29): May or may not be conjugated to a chemical probe
RLDPADLQLLLDWVGAPAFAAGEAWAPVCLPRF

SEQ ID NO: 5016 - protein, 17 aa, Homo sapiens
  Table 3 sequence identifier: Q7L1V2_C349
  MOD_RES (8)..(8): May or may not be conjugated to a chemical probe
RLDAMPVCLLLLGTQRE

SEQ ID NO: 5017 - protein, 45 aa, Homo sapiens
  Table 3 sequence identifier: P62136_C202
  MOD_RES (12)..(12): May or may not be conjugated to a chemical probe
RPTDVPDQGLLCDLLWSDPDKDVQGWGENDRGVSFTFGAEVVAKF

SEQ ID NO: 5018 - protein, 20 aa, Homo sapiens
  Table 3 sequence identifier: Q8IWS0_C87
  MOD_RES (9)..(9): May or may not be conjugated to a chemical probe
KLMCSLCHCPGATIGCDVKT

SEQ ID NO: 5019 - protein, 26 aa, Homo sapiens
  Table 3 sequence identifier: O95239_C1159
  MOD_RES (19)..(19): May or may not be conjugated to a chemical probe
KLEDPTEVTPGLSFFNPVCATPNSKI

SEQ ID NO: 5020 - protein, 28 aa, Homo sapiens
  Table 3 sequence identifier: P05091_C66
  MOD_RES (15)..(15): May or may not be conjugated to a chemical probe
KTFPTVNPSTGEVICQVAEGDKEDVDKA

SEQ ID NO: 5021 - protein, 21 aa, Homo sapiens
  Table 3 sequence identifier: O75817_C66
  MOD_RES (6)..(6): May or may not be conjugated to a chemical probe
RGQNACSEIYIHGLGLAINRA

SEQ ID NO: 5022 - protein, 18 aa, Homo sapiens
  Table 3 sequence identifier: O15231_C650
  MOD_RES (10)..(10): May or may not be conjugated to a chemical probe
KITLEHLGICCHEYCFKC

SEQ ID NO: 5023 - protein, 13 aa, Homo sapiens
  Table 3 sequence identifier: Q92922_C520
  MOD_RES (8)..(8): May or may not be conjugated to a chemical probe
RNLTGDVCAVMRV

SEQ ID NO: 5024 - protein, 35 aa, Homo sapiens
  Table 3 sequence identifier: Q9NSY1_C32
  MOD_RES (24)..(24): May or may not be conjugated to a chemical probe
KSEGGSGGGAAGGGAGGAGAGAGCGSGGSSVGVRV

SEQ ID NO: 5025 - protein, 24 aa, Homo sapiens
  Table 3 sequence identifier: O60671_C148
  MOD_RES (16)..(16): May or may not be conjugated to a chemical probe
KINTQEPEETLDFDFCSTNVINKI

SEQ ID NO: 5026 - protein, 15 aa, Homo sapiens
  Table 3 sequence identifier: O75676_C425
  MOD_RES (13)..(13): May or may not be conjugated to a chemical probe
REPALGQGSFSVCRR

SEQ ID NO: 5027 - protein, 22 aa, Homo sapiens
  Table 3 sequence identifier: Q01082_C964
  MOD_RES (17)..(17): May or may not be conjugated to a chemical probe
KDALLSALSIQNYHLECNETKS

SEQ ID NO: 5028 - protein, 36 aa, Homo sapiens
  Table 3 sequence identifier: P61812_C380
  MOD_RES (19)..(19): May or may not be conjugated to a chemical probe
RVLSLYNTINPEASASPCCVSQDLEPLTILYYIGKT

SEQ ID NO: 5029 - protein, 18 aa, Homo sapiens
  Table 3 sequence identifier: P42704_C361
  MOD_RES (13)..(13): May or may not be conjugated to a chemical probe
KLEDVALQILLACPVSKE

SEQ ID NO: 5030 - protein, 19 aa, Homo sapiens
  Table 3 sequence identifier: P42858_C777
  MOD_RES (13)..(13): May or may not be conjugated to a chemical probe
RGATAILCGTLICSILSRS

SEQ ID NO: 5031 - protein, 22 aa, Homo sapiens
  Table 3 sequence identifier: P42858_C1808
  MOD_RES (8)..(8): May or may not be conjugated to a chemical probe
RLFRSDGCGGSFYTLDSLNLRA

SEQ ID NO: 5032 - protein, 22 aa, Homo sapiens
  Table 3 sequence identifier: P34932_C146
  MOD_RES (13)..(13): May or may not be conjugated to a chemical probe
KKPVVDCVVSVPCFYTDAERRS

SEQ ID NO: 5033 - protein, 17 aa, Homo sapiens
  Table 3 sequence identifier: P34932_C167
  MOD_RES (14)..(14): May or may not be conjugated to a chemical probe
RSVMDATQIAGLNCLRL

SEQ ID NO: 5034 - protein, 12 aa, Homo sapiens
  Table 3 sequence identifier: O43447_C174
  MOD_RES (9)..(9): May or may not be conjugated to a chemical probe
KLPVVISQCGEM

SEQ ID NO: 5035 - protein, 18 aa, Homo sapiens
  Table 3 sequence identifier: P31937_C75
  MOD_RES (16)..(16): May or may not be conjugated to a chemical probe
KHGYPLIIYDVFPDACKE

SEQ ID NO: 5036 - protein, 44 aa, Homo sapiens
  Table 3 sequence identifier: P31937_C199
  MOD_RES (33)..(33): May or may not be conjugated to a chemical probe
RSGNLTFMVGGVEDEFAAAQELLGCMGSNVVYCGAVGTGQAAKI

SEQ ID NO: 5037 - protein, 24 aa, Homo sapiens
  Table 3 sequence identifier: Q8IXK0_C740
  MOD_RES (2)..(2): May or may not be conjugated to a chemical probe
RCSDNSSYEEPLSPISASSSTSRR

SEQ ID NO: 5038 - protein, 27 aa, Homo sapiens
  Table 3 sequence identifier: Q9NUI1_C120
  MOD_RES (15)..(15): May or may not be conjugated to a chemical probe
RIDILINCAAGNFLCPAGALSFNAFKT

SEQ ID NO: 5039 - protein, 23 aa, Homo sapiens
  Table 3 sequence identifier: Q9NR50_C334
  MOD_RES (7)..(7): May or may not be conjugated to a chemical probe
KLLSALCPEEPPVHSSAQIVSKH

SEQ ID NO: 5040 - protein, 10 aa, Homo sapiens
  Table 3 sequence identifier: Q9NV56_C59
  MOD_RES (7)..(7): May or may not be conjugated to a chemical probe
RHFHMICIRD

SEQ ID NO: 5041 - protein, 11 aa, Homo sapiens
  Table 3 sequence identifier: Q9BYV9_C340
  MOD_RES (8)..(8): May or may not be conjugated to a chemical probe
RSVASPSCLRS

SEQ ID NO: 5042 - protein, 13 aa, Homo sapiens
  Table 3 sequence identifier: P08237_C351
  MOD_RES (7)..(7): May or may not be conjugated to a chemical probe
RLPLMECVQVTKD

SEQ ID NO: 5043 - protein, 22 aa, Homo sapiens
  Table 3 sequence identifier: Q15118_C240
  MOD_RES (3)..(3): May or may not be conjugated to a chemical probe
RLCDLYYINSPELELEELNAKS

SEQ ID NO: 5044 - protein, 10 aa, Homo sapiens
  Table 3 sequence identifier: Q5M775_C805
  MOD_RES (6)..(6): May or may not be conjugated to a chemical probe
RWPGVCVSRT

SEQ ID NO: 5045 - protein, 35 aa, Homo sapiens
  Table 3 sequence identifier: Q9H845_C507
  MOD_RES (31)..(31): May or may not be conjugated to a chemical probe
RTVDLGLTGNHGVVHPSLADSANKFEENTYCFGRT

SEQ ID NO: 5046 - protein, 34 aa, Homo sapiens
  Table 3 sequence identifier: Q8TF72_C1983
  MOD_RES (21)..(21): May or may not be conjugated to a chemical probe
KAGALALPPNLTSEPIPAGGCTFSGIFPTLTSPL

SEQ ID NO: 5047 - protein, 18 aa, Homo sapiens
  Table 3 sequence identifier: Q7Z5L9_C521
  MOD_RES (10)..(10): May or may not be conjugated to a chemical probe
RLEDTHFVQCPSVPSHKF

SEQ ID NO: 5048 - protein, 13 aa, Homo sapiens
  Table 3 sequence identifier: Q86VP6_C237
  MOD_RES (6)..(6): May or may not be conjugated to a chemical probe
RTYIQCIAAISRQ

SEQ ID NO: 5049 - protein, 12 aa, Homo sapiens
  Table 3 sequence identifier: O43148_C95
  MOD_RES (3)..(3): May or may not be conjugated to a chemical probe
KDCGDAEGNSKK

SEQ ID NO: 5050 - protein, 30 aa, Homo sapiens
  Table 3 sequence identifier: P27144_C104
  MOD_RES (13)..(13): May or may not be conjugated to a chemical probe
RTLGQAEALDKICEVDLVISLNIPFETLKD

SEQ ID NO: 5051 - protein, 17 aa, Homo sapiens
  Table 3 sequence identifier: P67775_C269
  MOD_RES (2)..(2): May or may not be conjugated to a chemical probe
RCGNQAAIMELDDTLKY

SEQ ID NO: 5052 - protein, 9 aa, Homo sapiens
  Table 3 sequence identifier: Q92667_C438
  MOD_RES (6)..(6): May or may not be conjugated to a chemical probe
KTYVSCLKS

SEQ ID NO: 5053 - protein, 11 aa, Homo sapiens
  Table 3 sequence identifier: Q9NYL2_C285
  MOD_RES (2)..(2): May or may not be conjugated to a chemical probe
RCEIEATLERL

SEQ ID NO: 5054 - protein, 27 aa, Homo sapiens
  Table 3 sequence identifier: Q9Y5X2_C455
  MOD_RES (17)..(17): May or may not be conjugated to a chemical probe
KLSCLFAGPHSTLTPPCSPPEDGLCPH

SEQ ID NO: 5055 - protein, 9 aa, Homo sapiens
  Table 3 sequence identifier: Q14152_C185
  MOD_RES (3)..(3): May or may not be conjugated to a chemical probe
KFCLQYTRK

SEQ ID NO: 5056 - protein, 20 aa, Homo sapiens
  Table 3 sequence identifier: Q15669_C108
  MOD_RES (6)..(6): May or may not be conjugated to a chemical probe
RSNLPCTPVLVVATQTDQRE

SEQ ID NO: 5057 - protein, 23 aa, Homo sapiens
  Table 3 sequence identifier: P19623_C89
  MOD_RES (16)..(16): May or may not be conjugated to a chemical probe
RDEFSYQEMIANLPLCSHPNPRK

SEQ ID NO: 5058 - protein, 18 aa, Homo sapiens
  Table 3 sequence identifier: P63244_C153
  MOD_RES (15)..(15): May or may not be conjugated to a chemical probe
KYTVQDESHSEWVSCVRF

SEQ ID NO: 5059 - protein, 24 aa, Homo sapiens
  Table 3 sequence identifier: Q9NZB2_C892
  MOD_RES (7)..(7): May or may not be conjugated to a chemical probe
RGFAGVCGFGGPYGETVATGPYRA

SEQ ID NO: 5060 - protein, 25 aa, Homo sapiens
  Table 3 sequence identifier: Q15398_C696
  MOD_RES (9)..(9): May or may not be conjugated to a chemical probe
RSSIEDAQCPGLPDLIEENHVVNKT

SEQ ID NO: 5061 - protein, 25 aa, Homo sapiens
  Table 3 sequence identifier: O60566_C51
  MOD_RES (16)..(16): May or may not be conjugated to a chemical probe
RIMSTLQGALAQESACNNTLQQQKR

SEQ ID NO: 5062 - protein, 14 aa, Homo sapiens
  Table 3 sequence identifier: Q9UDY4_C175
  MOD_RES (11)..(11): May or may not be conjugated to a chemical probe
RVSLEEIYSGCTKK

SEQ ID NO: 5063 - protein, 11 aa, Homo sapiens
  Table 3 sequence identifier: Q03001_C6799
  MOD_RES (8)..(8): May or may not be conjugated to a chemical probe
RDKWDTICGKS

SEQ ID NO: 5064 - protein, 19 aa, Homo sapiens
  Table 3 sequence identifier: P11182_C279
  MOD_RES (8)..(8): May or may not be conjugated to a chemical probe
KIPHFGYCDEIDLTELVKL

SEQ ID NO: 5065 - protein, 36 aa, Homo sapiens
  Table 3 sequence identifier: P56537_C110
  MOD_RES (11)..(11): May or may not be conjugated to a chemical probe
RLSALGNVTTCNDYVALVHPDLDRETEEILADVLKV

SEQ ID NO: 5066 - protein, 23 aa, Homo sapiens
  Table 3 sequence identifier: O15037_C157
  MOD_RES (17)..(17): May or may not be conjugated to a chemical probe
RLSWDFTPGPSSGASQCTGVLRD

SEQ ID NO: 5067 - protein, 22 aa, Homo sapiens
  Table 3 sequence identifier: Q15052_C57
  MOD_RES (3)..(3): May or may not be conjugated to a chemical probe
KFCLDPQTEADCINNINDFLKG

SEQ ID NO: 5068 - protein, 12 aa, Homo sapiens
  Table 3 sequence identifier: Q15052_C553
  MOD_RES (6)..(6): May or may not be conjugated to a chemical probe
RGPASCSSLSKT

SEQ ID NO: 5069 - protein, 9 aa, Homo sapiens
  Table 3 sequence identifier: O00592_C381
  MOD_RES (7)..(7): May or may not be conjugated to a chemical probe
KLISLICRA

SEQ ID NO: 5070 - protein, 11 aa, Homo sapiens
  Table 3 sequence identifier: E7EVH7_C408
  MOD_RES (9)..(9): May or may not be conjugated to a chemical probe
RYEVAVPLCKQ

SEQ ID NO: 5071 - protein, 16 aa, Homo sapiens
  Table 3 sequence identifier: E7EVH7_C628
  MOD_RES (3)..(3): May or may not be conjugated to a chemical probe
KACKVDSPTVTTTLKN

SEQ ID NO: 5072 - protein, 21 aa, Homo sapiens
  Table 3 sequence identifier: Q9H2U2_C161
  MOD_RES (5)..(5): May or may not be conjugated to a chemical probe
KSTNCFGDNDPIDVCEIGSKI

SEQ ID NO: 5073 - protein, 10 aa, Homo sapiens
  Table 3 sequence identifier: P24390_C29
  MOD_RES (3)..(3): May or may not be conjugated to a chemical probe
RSCAGISGKS

SEQ ID NO: 5074 - protein, 32 aa, Homo sapiens
  Table 3 sequence identifier: Q9H0W9_C149
  MOD_RES (2)..(2): May or may not be conjugated to a chemical probe
KCHDFQCALLANLFASEGQPGKVIEVKAKRRT

SEQ ID NO: 5075 - protein, 23 aa, Homo sapiens
  Table 3 sequence identifier: Q9H0W9_C154
  MOD_RES (7)..(7): May or may not be conjugated to a chemical probe
KCHDFQCALLANLFASEGQPGKV

SEQ ID NO: 5076 - protein, 34 aa, Homo sapiens
  Table 3 sequence identifier: Q9UK59_C339
  MOD_RES (10)..(10): May or may not be conjugated to a chemical probe
KLNHDLKVPCNFSVTAACYDPSKPQTQMQLIHRI

SEQ ID NO: 5077 - protein, 12 aa, Homo sapiens
  Table 3 sequence identifier: Q6P2Q9_C435
  MOD_RES (4)..(4): May or may not be conjugated to a chemical probe
REHCPAGQPVKV

SEQ ID NO: 5078 - protein, 22 aa, Homo sapiens
  Table 3 sequence identifier: O75586_C137
  MOD_RES (20)..(20): May or may not be conjugated to a chemical probe
RVLTAVHGIQSAFDEAMSYCRY

SEQ ID NO: 5079 - protein, 18 aa, Homo sapiens
  Table 3 sequence identifier: Q99933_C213
  MOD_RES (16)..(16): May or may not be conjugated to a chemical probe
KEMETPLSALGIQDGCRV

SEQ ID NO: 5080 - protein, 22 aa, Homo sapiens
  Table 3 sequence identifier: Q9H4L5_C515
  MOD_RES (3)..(3): May or may not be conjugated to a chemical probe
RTCLPAPCPSSSNISLWNILRN

SEQ ID NO: 5081 - protein, 15 aa, Homo sapiens
  Table 3 sequence identifier: Q14149_C694
  MOD_RES (8)..(8): May or may not be conjugated to a chemical probe
KSADDAGCQLQELRN

SEQ ID NO: 5082 - protein, 25 aa, Homo sapiens
  Table 3 sequence identifier: Q92546_C314
  MOD_RES (17)..(17): May or may not be conjugated to a chemical probe
RTSFSLPIPLSSTPGFCTAIVSLKW

SEQ ID NO: 5083 - protein, 10 aa, Homo sapiens
  Table 3 sequence identifier: P46821_C1228
  MOD_RES (5)..(5): May or may not be conjugated to a chemical probe
RDAYCSEVKA

SEQ ID NO: 5084 - protein, 22 aa, Homo sapiens
  Table 3 sequence identifier: O60343_C753
  MOD_RES (6)..(6): May or may not be conjugated to a chemical probe
RTSSTCSNESLSVGGTSVTPRR

SEQ ID NO: 5085 - protein, 28 aa, Homo sapiens
  Table 3 sequence identifier: Q9UBT2_C432
  MOD_RES (6)..(6): May or may not be conjugated to a chemical probe
KLLVPCALDPPNPNCYVCASKPEVTVRL

SEQ ID NO: 5086 - protein, 26 aa, Homo sapiens
  Table 3 sequence identifier: Q86SQ0_C935
  MOD_RES (12)..(12): May or may not be conjugated to a chemical probe
KAHLPLGQSNSCGSVLPPSLAAMAKD

SEQ ID NO: 5087 - protein, 14 aa, Homo sapiens
  Table 3 sequence identifier: Q96A65_C957
  MOD_RES (7)..(7): May or may not be conjugated to a chemical probe
RLKEIICEQAAIKQ

SEQ ID NO: 5088 - protein, 25 aa, Homo sapiens
  Table 3 sequence identifier: O14980_C498
  MOD_RES (7)..(7): May or may not be conjugated to a chemical probe
KNLNTLCWAIGSISGAMHEEDEKRF

SEQ ID NO: 5089 - protein, 13 aa, Homo sapiens
  Table 3 sequence identifier: Q9ULP9_C29
  MOD_RES (5)..(5): May or may not be conjugated to a chemical probe
KELSCTELQELKQ

SEQ ID NO: 5090 - protein, 23 aa, Homo sapiens
  Table 3 sequence identifier: P28290_C448
  MOD_RES (13)..(13): May or may not be conjugated to a chemical probe
KSVHISTPEKEPCAPLTIPSIRN

SEQ ID NO: 5091 - protein, 9 aa, Homo sapiens
  Table 3 sequence identifier: P31948_C62
  MOD_RES (7)..(7): May or may not be conjugated to a chemical probe
KAYEDGCKT

SEQ ID NO: 5092 - protein, 20 aa, Homo sapiens
  Table 3 sequence identifier: O95071_C739
  MOD_RES (4)..(4): May or may not be conjugated to a chemical probe
KKLCIPEKTEILAVNVDSKG

SEQ ID NO: 5093 - protein, 37 aa, Homo sapiens
  Table 3 sequence identifier: Q96L91_C694
  MOD_RES (10)..(10): May or may not be conjugated to a chemical probe
RLPVDPAPPCPRPLPTSSTSSLAPVSGSGPGPSPARS

SEQ ID NO: 5094 - protein, 13 aa, Homo sapiens
  Table 3 sequence identifier: Q9Y2L1_C357
  MOD_RES (7)..(7): May or may not be conjugated to a chemical probe
RNWRPYCGMLSKS

SEQ ID NO: 5095 - protein, 13 aa, Homo sapiens
  Table 3 sequence identifier: Q96L94_C184
  MOD_RES (4)..(4): May or may not be conjugated to a chemical probe
KAACHPAPLPPMP

SEQ ID NO: 5096 - protein, 15 aa, Homo sapiens
  Table 3 sequence identifier: Q15437_C40
  MOD_RES (8)..(8): May or may not be conjugated to a chemical probe
RMVVPLACLLTPLKE

SEQ ID NO: 5097 - protein, 38 aa, Homo sapiens
  Table 3 sequence identifier: Q9H0F6_C140
  MOD_RES (13)..(13): May or may not be conjugated to a chemical probe
KSNSPPALGPEACPVSLPSPPEASTLKGPPPEADLPRS

SEQ ID NO: 5098 - protein, 33 aa, Homo sapiens
  Table 3 sequence identifier: Q6NZY4_C633
  MOD_RES (23)..(23): May or may not be conjugated to a chemical probe
KAELAPVNTEGALLDNGSVVPNCDISNGGSQKL

SEQ ID NO: 5099 - protein, 32 aa, Homo sapiens
  Table 3 sequence identifier: Q6NVY1_C271
  MOD_RES (5)..(5): May or may not be conjugated to a chemical probe
KINSCFSANTVEEIIENLQQDGSSFALEQLKV

SEQ ID NO: 5100 - protein, 41 aa, Homo sapiens
  Table 3 sequence identifier: P38432_C425
  MOD_RES (7)..(7): May or may not be conjugated to a chemical probe
RGHPVSCVVNRSTDNQRQQQLNDVVKNSSTIIQNPVETPKK

SEQ ID NO: 5101 - protein, 8 aa, Homo sapiens
  Table 3 sequence identifier: Q29RF7_C508
  MOD_RES (2)..(2): May or may not be conjugated to a chemical probe
KCQNMLRS

SEQ ID NO: 5102 - protein, 33 aa, Homo sapiens
  Table 3 sequence identifier: Q29RF7_C925
  MOD_RES (28)..(28): May or may not be conjugated to a chemical probe
KLAQEPCYHEIITPEQFQLCALVINDECYQVRQ

SEQ ID NO: 5103 - protein, 28 aa, Homo sapiens
  Table 3 sequence identifier: Q8N5C7_C40
  MOD_RES (18)..(18): May or may not be conjugated to a chemical probe
KQSQTTSIASEDPLQNLCLASQEVLQKA

SEQ ID NO: 5104 - protein, 17 aa, Homo sapiens
  Table 3 sequence identifier: O60437_C660
  MOD_RES (10)..(10): May or may not be conjugated to a chemical probe
KGQELAAMACELQAQKS

SEQ ID NO: 5105 - protein, 16 aa, Homo sapiens
  Table 3 sequence identifier: Q15042_C678
  MOD_RES (6)..(6): May or may not be conjugated to a chemical probe
RMQSACLLSDMESFKA

SEQ ID NO: 5106 - protein, 16 aa, Homo sapiens
  Table 3 sequence identifier: O15111_C406
  MOD_RES (6)..(6): May or may not be conjugated to a chemical probe
RSLSDCVNYIVQDSKI

SEQ ID NO: 5107 - protein, 9 aa, Homo sapiens
  Table 3 sequence identifier: P49915_C554
  MOD_RES (3)..(3): May or may not be conjugated to a chemical probe
RMCHNVNRV

SEQ ID NO: 5108 - protein, 31 aa, Homo sapiens
  Table 3 sequence identifier: Q9Y490_C709
  MOD_RES (18)..(18): May or may not be conjugated to a chemical probe
RTEDSGLQTQVIAAATQCALSTSQLVACTKV

SEQ ID NO: 5109 - protein, 23 aa, Homo sapiens
  Table 3 sequence identifier: Q9Y490_C1661
  MOD_RES (10)..(10): May or may not be conjugated to a chemical probe
RDKAPGQLECETAIAALNSCLRD

SEQ ID NO: 5110 - protein, 11 aa, Homo sapiens
  Table 3 sequence identifier: Q9UGI8_C238
  MOD_RES (8)..(8): May or may not be conjugated to a chemical probe
RTQYSCYCCKL

SEQ ID NO: 5111 - protein, 15 aa, Homo sapiens
  Table 3 sequence identifier: Q9Y3D3_C26
  MOD_RES (7)..(7): May or may not be conjugated to a chemical probe
RLALGGCTNRPFYRI

SEQ ID NO: 5112 - protein, 13 aa, Homo sapiens
  Table 3 sequence identifier: Q8WUY1_C104
  MOD_RES (10)..(10): May or may not be conjugated to a chemical probe
RAHTVLAASCARH

SEQ ID NO: 5113 - protein, 23 aa, Homo sapiens
  Table 3 sequence identifier: Q969Y2_C489
  MOD_RES (20)..(20): May or may not be conjugated to a chemical probe
RLTGGGGTEEILDIIFQDFCVGK

SEQ ID NO: 5114 - protein, 12 aa, Homo sapiens
  Table 3 sequence identifier: Q13042_C194
  MOD_RES (3)..(3): May or may not be conjugated to a chemical probe
KLCNEEQELLRF

SEQ ID NO: 5115 - protein, 15 aa, Homo sapiens
  Table 3 sequence identifier: Q8IWP9_C108
  MOD_RES (7)..(7): May or may not be conjugated to a chemical probe
KSFSAHCTQVVNAKK

SEQ ID NO: 5116 - protein, 52 aa, Homo sapiens
  Table 3 sequence identifier: Q13469_C386
  MOD_RES (26)..(26): May or may not be conjugated to a chemical probe
RNSAPESILLVPPTWPKPLVPAIPICSIPVTASLPPLEWPLSSQSGSYELRI

SEQ ID NO: 5117 - protein, 22 aa, Homo sapiens
  Table 3 sequence identifier: Q13263_C232
  MOD_RES (3)..(3): May or may not be conjugated to a chemical probe
RDCQLNAHKDHQYQFLEDAVRN

SEQ ID NO: 5118 - protein, 27 aa, Homo sapiens
  Table 3 sequence identifier: Q16822_C210
  MOD_RES (2)..(2): May or may not be conjugated to a chemical probe
KCLHSVGQPLTGQGEPVSQWPCNPEKT

SEQ ID NO: 5119 - protein, 8 aa, Homo sapiens
  Table 3 sequence identifier: Q96BY7_C891
  MOD_RES (4)..(4): May or may not be conjugated to a chemical probe
KDVCDLRR

SEQ ID NO: 5120 - protein, 14 aa, Homo sapiens
  Table 3 sequence identifier: Q9H8M7_C27
  MOD_RES (12)..(12): May or may not be conjugated to a chemical probe
KSSPGLSDTIFCRW

SEQ ID NO: 5121 - protein, 15 aa, Homo sapiens
  Table 3 sequence identifier: Q8N7H5_C36
  MOD_RES (3)..(3): May or may not be conjugated to a chemical probe
KYCNSLPDIPFDPKF

SEQ ID NO: 5122 - protein, 9 aa, Homo sapiens
  Table 3 sequence identifier: O00116_C226
  MOD_RES (7)..(7): May or may not be conjugated to a chemical probe
KIVNLACKY

SEQ ID NO: 5123 - protein, 16 aa, Homo sapiens
  Table 3 sequence identifier: O14641_C354
  MOD_RES (2)..(2): May or may not be conjugated to a chemical probe
KCWDPSPQAYFTLPRN

SEQ ID NO: 5124 - protein, 36 aa, Homo sapiens
  Table 3 sequence identifier: P49588_C723
  MOD_RES (29)..(29): May or may not be conjugated to a chemical probe
RVVSIGVPVSELLDDPSGPAGSLTSVEFCGGTHLRN

SEQ ID NO: 5125 - protein, 14 aa, Homo sapiens
  Table 3 sequence identifier: Q9H0G5_C171
  MOD_RES (8)..(8): May or may not be conjugated to a chemical probe
RAAALEACLDVTKQ

SEQ ID NO: 5126 - protein, 15 aa, Homo sapiens
  Table 3 sequence identifier: Q9NZN5_C784
  MOD_RES (10)..(10): May or may not be conjugated to a chemical probe
REVLLGLKPCEIKRQ

SEQ ID NO: 5127 - protein, 28 aa, Homo sapiens
  Table 3 sequence identifier: Q5JVF3_C362
  MOD_RES (15)..(15): May or may not be conjugated to a chemical probe
KFMQVEDVDIDEVQCILANLIYMGHVKG

SEQ ID NO: 5128 - protein, 41 aa, Homo sapiens
  Table 3 sequence identifier: P56192_C566
  MOD_RES (13)..(13): May or may not be conjugated to a chemical probe
KDNVPFHSLVFPCSALGAEDNYTLVSHLIATEYLNYEDGKF

SEQ ID NO: 5129 - protein, 25 aa, Homo sapiens
  Table 3 sequence identifier: P07954_C434
  MOD_RES (14)..(14): May or may not be conjugated to a chemical probe
RLLGDASVSFTENCVVGIQANTERI

SEQ ID NO: 5130 - protein, 17 aa, Homo sapiens
  Table 3 sequence identifier: P09429_C106
  MOD_RES (10)..(10): May or may not be conjugated to a chemical probe
RPPSAFFLFCSEYRPKI

SEQ ID NO: 5131 - protein, 16 aa, Homo sapiens
  Table 3 sequence identifier: Q9BVP2_C158
  MOD_RES (2)..(2): May or may not be conjugated to a chemical probe
RCPQVEEAIVQSGQKK

SEQ ID NO: 5132 - protein, 10 aa, Homo sapiens
  Table 3 sequence identifier: Q13813_C315
  MOD_RES (4)..(4): May or may not be conjugated to a chemical probe
KALCAEADRL

SEQ ID NO: 5133 - protein, 12 aa, Homo sapiens
  Table 3 sequence identifier: Q66PJ3_C159
  MOD_RES (3)..(3): May or may not be conjugated to a chemical probe
RNCSASTSQGRK

SEQ ID NO: 5134 - protein, 25 aa, Homo sapiens
  Table 3 sequence identifier: P55957_C15
  MOD_RES (4)..(4): May or may not be conjugated to a chemical probe
RDECITNLLVFGFLQSCSDNSFRRE

SEQ ID NO: 5135 - protein, 24 aa, Homo sapiens
  Table 3 sequence identifier: Q9H4A3_C547
  MOD_RES (18)..(18): May or may not be conjugated to a chemical probe
RDVPEDVAQEMVESGYVCEGDHKT

SEQ ID NO: 5136 - protein, 33 aa, Homo sapiens
  Table 3 sequence identifier: P27797_C137
  MOD_RES (27)..(27): May or may not be conjugated to a chemical probe
KLFPNSLDQTDMHGDSEYNIMFGPDICGPGTKK

SEQ ID NO: 5137 - protein, 11 aa, Homo sapiens
  Table 3 sequence identifier: P15498_C83
  MOD_RES (8)..(8): May or may not be conjugated to a chemical probe
RTFLSTCCEKF

SEQ ID NO: 5138 - protein, 9 aa, Homo sapiens
  Table 3 sequence identifier: Q9Y572_C365
  MOD_RES (3)..(3): May or may not be conjugated to a chemical probe
KKCPSLTKR

SEQ ID NO: 5139 - protein, 22 aa, Homo sapiens
  Table 3 sequence identifier: Q8IX90_C290
  MOD_RES (16)..(16): May or may not be conjugated to a chemical probe
KSDAEYTNSPLVPTFCTPGLKI

SEQ ID NO: 5140 - protein, 12 aa, Homo sapiens
  Table 3 sequence identifier: O96019_C32
  MOD_RES (9)..(9): May or may not be conjugated to a chemical probe
RAGYAGEDCPKV

SEQ ID NO: 5141 - protein, 13 aa, Homo sapiens
  Table 3 sequence identifier: P46939_C447
  MOD_RES (5)..(5): May or may not be conjugated to a chemical probe
KMETCPLDDDVKS

SEQ ID NO: 5142 - protein, 31 aa, Homo sapiens
  Table 3 sequence identifier: P46939_C1759
  MOD_RES (12)..(12): May or may not be conjugated to a chemical probe
KLLIAQEPLYQCLVTTETFETGVPFSDLEKL

SEQ ID NO: 5143 - protein, 27 aa, Homo sapiens
  Table 3 sequence identifier: P52701_C1275
  MOD_RES (13)..(13): May or may not be conjugated to a chemical probe
RLGHMACMVENECEDPSQETITFLYKF

SEQ ID NO: 5144 - protein, 43 aa, Homo sapiens
  Table 3 sequence identifier: Q14160_C1612
  MOD_RES (39)..(39): May or may not be conjugated to a chemical probe
RSLEPSPSPGPQEEDGEVALVLLGRPSPGAVGPEDVALCSSRR

SEQ ID NO: 5145 - protein, 15 aa, Homo sapiens
  Table 3 sequence identifier: O14879_C39
  MOD_RES (3)..(3): May or may not be conjugated to a chemical probe
RVCNQIEFLNTEFKA

SEQ ID NO: 5146 - protein, 8 aa, Homo sapiens
  Table 3 sequence identifier: Q16543_C64
  MOD_RES (5)..(5): May or may not be conjugated to a chemical probe
KVAECQRK

SEQ ID NO: 5147 - protein, 38 aa, Homo sapiens
  Table 3 sequence identifier: O75962_C868
  MOD_RES (35)..(35): May or may not be conjugated to a chemical probe
KALTMNNLTFDVIHQGQDLLQYVNEVQASGVELLCDRD

SEQ ID NO: 5148 - protein, 20 aa, Homo sapiens
  Table 3 sequence identifier: Q9H3S7_C1466
  MOD_RES (8)..(8): May or may not be conjugated to a chemical probe
RHGVPPPCKPLASASISQKN

SEQ ID NO: 5149 - protein, 13 aa, Homo sapiens
  Table 3 sequence identifier: P26196_C102
  MOD_RES (9)..(9): May or may not be conjugated to a chemical probe
KGNEFEDYCLKRE

SEQ ID NO: 5150 - protein, 14 aa, Homo sapiens
  Table 3 sequence identifier: P33992_C207
  MOD_RES (2)..(2): May or may not be conjugated to a chemical probe
KCPLDPYFIMPDKC

SEQ ID NO: 5151 - protein, 22 aa, Homo sapiens
  Table 3 sequence identifier: O14893_C34
  MOD_RES (8)..(8): May or may not be conjugated to a chemical probe
RLLPVEPCDLTEGFDPSVPPRT

SEQ ID NO: 5152 - protein, 10 aa, Homo sapiens
  Table 3 sequence identifier: Q86SE5_C51
  MOD_RES (5)..(5): May or may not be conjugated to a chemical probe
KIVGCSVHKG

SEQ ID NO: 5153 - protein, 19 aa, Homo sapiens
  Table 3 sequence identifier: Q9BUN5_C13
  MOD_RES (6)..(6): May or may not be conjugated to a chemical probe
RSPKPCLAQPAQAPGTLRR

SEQ ID NO: 5154 - protein, 15 aa, Homo sapiens
  Table 3 sequence identifier: Q9NR12_C388
  MOD_RES (12)..(12): May or may not be conjugated to a chemical probe
RAFYMEEGVPYCERD

SEQ ID NO: 5155 - protein, 11 aa, Homo sapiens
  Table 3 sequence identifier: Q9NR19_C75
  MOD_RES (4)..(4): May or may not be conjugated to a chemical probe
KTPCPGPFLRY

SEQ ID NO: 5156 - protein, 14 aa, Homo sapiens
  Table 3 sequence identifier: Q9Y2X0_C790
  MOD_RES (7)..(7): May or may not be conjugated to a chemical probe
RLHLGACPTEECKA

SEQ ID NO: 5157 - protein, 10 aa, Homo sapiens
  Table 3 sequence identifier: Q9Y2X0_C801
  MOD_RES (2)..(2): May or may not be conjugated to a chemical probe
RCGCVTMLKS

SEQ ID NO: 5158 - protein, 8 aa, Homo sapiens
  Table 3 sequence identifier: Q00325_C237
  MOD_RES (4)..(4): May or may not be conjugated to a chemical probe
KFACFERT

SEQ ID NO: 5159 - protein, 15 aa, Homo sapiens
  Table 3 sequence identifier: O95861_C243
  MOD_RES (12)..(12): May or may not be conjugated to a chemical probe
KASAYVFASPGCKKW

SEQ ID NO: 5160 - protein, 10 aa, Homo sapiens
  Table 3 sequence identifier: Q5VUA4_C475
  MOD_RES (7)..(7): May or may not be conjugated to a chemical probe
KFGSFLCHKD

SEQ ID NO: 5161 - protein, 9 aa, Homo sapiens
  Table 3 sequence identifier: Q8TDZ2_C837
  MOD_RES (3)..(3): May or may not be conjugated to a chemical probe
RSCSALARH

SEQ ID NO: 5162 - protein, 18 aa, Homo sapiens
  Table 3 sequence identifier: Q7RTV0_C61
  MOD_RES (5)..(5): May or may not be conjugated to a chemical probe
RCVICGGPGVSDAYYCKE

SEQ ID NO: 5163 - protein, 33 aa, Homo sapiens
  Table 3 sequence identifier: Q9Y4R8_C644
  MOD_RES (14)..(14): May or may not be conjugated to a chemical probe
RTPQPGSPSPNTPCLPEAAVSQPGSAVASDWRV

SEQ ID NO: 5164 - protein, 27 aa, Homo sapiens
  Table 3 sequence identifier: Q2PPJ7_C838
  MOD_RES (21)..(21): May or may not be conjugated to a chemical probe
RSSSPAELDLKDDLQQTQGKCRERQKS

SEQ ID NO: 5165 - protein, 8 aa, Homo sapiens
  Table 3 sequence identifier: P09382_C131
  MOD_RES (4)..(4): May or may not be conjugated to a chemical probe
KIKCVAFD

SEQ ID NO: 5166 - protein, 14 aa, Homo sapiens
  Table 3 sequence identifier: O95081_C30
  MOD_RES (12)..(12): May or may not be conjugated to a chemical probe
KAEAEAASEVWCRR

SEQ ID NO: 5167 - protein, 19 aa, Homo sapiens
  Table 3 sequence identifier: Q8WV74_C224
  MOD_RES (8)..(8): May or may not be conjugated to a chemical probe
KQPLASPCQASSTPGLNKG

SEQ ID NO: 5168 - protein, 32 aa, Homo sapiens
  Table 3 sequence identifier: Q86Y37_C166
  MOD_RES (28)..(28): May or may not be conjugated to a chemical probe
KLDGAIDQLLTQSPGDYIPISYEQIYSCVYKC

SEQ ID NO: 5169 - protein, 21 aa, Homo sapiens
  Table 3 sequence identifier: O43414_C258
  MOD_RES (8)..(8): May or may not be conjugated to a chemical probe
KVMLPGQCQYLGLPVADYFKQ

SEQ ID NO: 5170 - protein, 12 aa, Homo sapiens
  Table 3 sequence identifier: Q6P0N0_C890
  MOD_RES (4)..(4): May or may not be conjugated to a chemical probe
KLHCAFASLPKH

SEQ ID NO: 5171 - protein, 43 aa, Homo sapiens
  Table 3 sequence identifier: Q5SW96_C286
  MOD_RES (21)..(21): May or may not be conjugated to a chemical probe
RTNPQVLDTGLTAQDMHYAQCLSPVDWDKPDSSGTEQDDLFSF

SEQ ID NO: 5172 - protein, 14 aa, Homo sapiens
  Table 3 sequence identifier: Q96FW1_C212
  MOD_RES (12)..(12): May or may not be conjugated to a chemical probe
KEFCQQEVEPMCKE

SEQ ID NO: 5173 - protein, 21 aa, Homo sapiens
  Table 3 sequence identifier: Q7Z7H8_C180
  MOD_RES (12)..(12): May or may not be conjugated to a chemical probe
RTVPFLPLLGGCIDDTILSRQ

SEQ ID NO: 5174 - protein, 14 aa, Homo sapiens
  Table 3 sequence identifier: P21266_C208
  MOD_RES (12)..(12): May or may not be conjugated to a chemical probe
KIAAYLQSDQFCKM

SEQ ID NO: 5175 - protein, 8 aa, Homo sapiens
  Table 3 sequence identifier: Q8N5F7_C47
  MOD_RES (5)..(5): May or may not be conjugated to a chemical probe
RSHSCSRS

SEQ ID NO: 5176 - protein, 11 aa, Homo sapiens
  Table 3 sequence identifier: Q00534_C83
  MOD_RES (6)..(6): May or may not be conjugated to a chemical probe
RLFDVCTVSRT

SEQ ID NO: 5177 - protein, 15 aa, Homo sapiens
  Table 3 sequence identifier: Q00537_C233
  MOD_RES (10)..(10): May or may not be conjugated to a chemical probe
RLEHEEGAPCTAIRE

SEQ ID NO: 5178 - protein, 22 aa, Homo sapiens
  Table 3 sequence identifier: Q13838_C300
  MOD_RES (2)..(2): May or may not be conjugated to a chemical probe
RCIALAQLLVEQNFPAIAIHRG

SEQ ID NO: 5179 - protein, 33 aa, Homo sapiens
  Table 3 sequence identifier: Q9HB09_C266
  MOD_RES (19)..(19): May or may not be conjugated to a chemical probe
RLVELFCSRDDSSRPSRACPGPPPPSPEPLARL

SEQ ID NO: 5180 - protein, 9 aa, Homo sapiens
  Table 3 sequence identifier: P13693_C172
  MOD_RES (9)..(9): May or may not be conjugated to a chemical probe
KDGLEMEKC

SEQ ID NO: 5181 - protein, 35 aa, Homo sapiens
  Table 3 sequence identifier: Q9H6Q4_C300
  MOD_RES (22)..(22): May or may not be conjugated to a chemical probe
RLLEEEGVSLPDLEPAPLDSLCSGASAEEPTSHRG

SEQ ID NO: 5182 - protein, 28 aa, Homo sapiens
  Table 3 sequence identifier: P05388_C226
  MOD_RES (7)..(7): May or may not be conjugated to a chemical probe
RNVASVCLQIGYPTVASVPHSIINGYKR

SEQ ID NO: 5183 - protein, 22 aa, Homo sapiens
  Table 3 sequence identifier: P16885_C937
  MOD_RES (16)..(16): May or may not be conjugated to a chemical probe
KNQSIAIELSDLVVYCKPTSKT

SEQ ID NO: 5184 - protein, 24 aa, Homo sapiens
  Table 3 sequence identifier: P16885_C1082
  MOD_RES (5)..(5): May or may not be conjugated to a chemical probe
RSIACPFVEVEICGAEYDNNKFKT

SEQ ID NO: 5185 - protein, 15 aa, Homo sapiens
  Table 3 sequence identifier: Q13905_C474
  MOD_RES (13)..(13): May or may not be conjugated to a chemical probe
RSAASQTADGSGCRV

SEQ ID NO: 5186 - protein, 9 aa, Homo sapiens
  Table 3 sequence identifier: O75439_C485
  MOD_RES (5)..(5): May or may not be conjugated to a chemical probe
RSNMCWLRD

SEQ ID NO: 5187 - protein, 14 aa, Homo sapiens
  Table 3 sequence identifier: P43034_C168
  MOD_RES (6)..(6): May or may not be conjugated to a chemical probe
KLLASCSADMTIKL

SEQ ID NO: 5188 - protein, 23 aa, Homo sapiens
  Table 3 sequence identifier: A6NDG6_C35
  MOD_RES (16)..(16): May or may not be conjugated to a chemical probe
RAQALLADVDTLLFDCDGVLWRG

SEQ ID NO: 5189 - protein, 12 aa, Homo sapiens
  Table 3 sequence identifier: A6NDG6_C217
  MOD_RES (8)..(8): May or may not be conjugated to a chemical probe
RFIAGTGCLVRA

SEQ ID NO: 5190 - protein, 22 aa, Homo sapiens
  Table 3 sequence identifier: O60610_C314
  MOD_RES (4)..(4): May or may not be conjugated to a chemical probe
KVGCLQLINALITPAEELDFRV

SEQ ID NO: 5191 - protein, 17 aa, Homo sapiens
  Table 3 sequence identifier: Q92598_C167
  MOD_RES (14)..(14): May or may not be conjugated to a chemical probe
RSVLDAAQIVGLNCLRL

SEQ ID NO: 5192 - protein, 10 aa, Homo sapiens
  Table 3 sequence identifier: Q13011_C92
  MOD_RES (6)..(6): May or may not be conjugated to a chemical probe
REMVECFNKI

SEQ ID NO: 5193 - protein, 15 aa, Homo sapiens
  Table 3 sequence identifier: Q8NEM2_C591
  MOD_RES (10)..(10): May or may not be conjugated to a chemical probe
RVDLEELIECATGKM

SEQ ID NO: 5194 - protein, 22 aa, Homo sapiens
  Table 3 sequence identifier: Q9NRH3_C13
  MOD_RES (11)..(11): May or may not be conjugated to a chemical probe
REIITLQLGQCGNQIGFEFWKQ

SEQ ID NO: 5195 - protein, 27 aa, Homo sapiens
  Table 3 sequence identifier: Q8NFC6_C1849
  MOD_RES (14)..(14): May or may not be conjugated to a chemical probe
KEGTNVPLVAAGPCDDEGIVTSTGAKE

SEQ ID NO: 5196 - protein, 17 aa, Homo sapiens
  Table 3 sequence identifier: Q7L8L6_C670
  MOD_RES (11)..(11): May or may not be conjugated to a chemical probe
KAAVPLGGFLCNVADKS

SEQ ID NO: 5197 - protein, 25 aa, Homo sapiens
  Table 3 sequence identifier: Q13123_C263
  MOD_RES (6)..(6): May or may not be conjugated to a chemical probe
RSKADCPTMEAQTTLTTNDIVISKL

SEQ ID NO: 5198 - protein, 9 aa, Homo sapiens
  Table 3 sequence identifier: Q9UPN3_C666
  MOD_RES (7)..(7): May or may not be conjugated to a chemical probe
KLETQYCKL

SEQ ID NO: 5199 - protein, 29 aa, Homo sapiens
  Table 3 sequence identifier: Q9UPN3_C7245
  MOD_RES (13)..(13): May or may not be conjugated to a chemical probe
RSSSSASQSNHSCTSMPSSPATPASGTKV

SEQ ID NO: 5200 - protein, 31 aa, Homo sapiens
  Table 3 sequence identifier: Q9UPN7_C689
  MOD_RES (27)..(27): May or may not be conjugated to a chemical probe
RSGGSTDSEDEEEEDEEEEEDEEGIGCAARG

SEQ ID NO: 5201 - protein, 42 aa, Homo sapiens
  Table 3 sequence identifier: Q9UGP4_C374
  MOD_RES (33)..(33): May or may not be conjugated to a chemical probe
KSYLSSSAPSSSPAGLDGSQQGAVPGLGPKPGCTDLGTGPKL

SEQ ID NO: 5202 - protein, 22 aa, Homo sapiens
  Table 3 sequence identifier: Q9UGP4_C401
  MOD_RES (20)..(20): May or may not be conjugated to a chemical probe
KLSPTSLVHPVMSTLPELSCKE

SEQ ID NO: 5203 - protein, 32 aa, Homo sapiens
  Table 3 sequence identifier: O75369_C183
  MOD_RES (15)..(15): May or may not be conjugated to a chemical probe
KALGALVDSCAPGLCPDWESWDPQKPVDNARE

SEQ ID NO: 5204 - protein, 16 aa, Homo sapiens
  Table 3 sequence identifier: O75369_C604
  MOD_RES (12)..(12): May or may not be conjugated to a chemical probe
KIEYNDQNDGSCDVKY

SEQ ID NO: 5205 - protein, 24 aa, Homo sapiens
  Table 3 sequence identifier: P40763_C687
  MOD_RES (3)..(3): May or may not be conjugated to a chemical probe
KYCRPESQEHPEADPGSAAPYLKT

SEQ ID NO: 5206 - protein, 30 aa, Homo sapiens
  Table 3 sequence identifier: Q13347_C160
  MOD_RES (13)..(13): May or may not be conjugated to a chemical probe
KITSAVWGPLGECIIAGHESGELNQYSAKS

SEQ ID NO: 5207 - protein, 17 aa, Homo sapiens
  Table 3 sequence identifier: Q96KG9_C210
  MOD_RES (4)..(4): May or may not be conjugated to a chemical probe
RLGCLIWEVFNGPLPRA

SEQ ID NO: 5208 - protein, 17 aa, Homo sapiens
  Table 3 sequence identifier: Q96KG9_C241
  MOD_RES (8)..(8): May or may not be conjugated to a chemical probe
KTLVPHYCELVGANPKV

SEQ ID NO: 5209 - protein, 11 aa, Homo sapiens
  Table 3 sequence identifier: P21980_C27
  MOD_RES (9)..(9): May or may not be conjugated to a chemical probe
RDHHTADLCRE

SEQ ID NO: 5210 - protein, 17 aa, Homo sapiens
  Table 3 sequence identifier: P21980_C524
  MOD_RES (13)..(13): May or may not be conjugated to a chemical probe
RTVSYNGILGPECGTKY

SEQ ID NO: 5211 - protein, 11 aa, Homo sapiens
  Table 3 sequence identifier: Q9ULJ6_C81
  MOD_RES (6)..(6): May or may not be conjugated to a chemical probe
RLLAVCAANRD

SEQ ID NO: 5212 - protein, 13 aa, Homo sapiens
  Table 3 sequence identifier: P30519_C265
  MOD_RES (3)..(3): May or may not be conjugated to a chemical probe
RKCPFYAAEQDKG

SEQ ID NO: 5213 - protein, 20 aa, Homo sapiens
  Table 3 sequence identifier: Q96RE7_C178
  MOD_RES (14)..(14): May or may not be conjugated to a chemical probe
RVKTEQQESDSVQCMPVAKR

SEQ ID NO: 5214 - protein, 22 aa, Homo sapiens
  Table 3 sequence identifier: Q96RE7_C301
  MOD_RES (4)..(4): May or may not be conjugated to a chemical probe
RQICNMYTMYSMMNVGQTAEKV

SEQ ID NO: 5215 - protein, 10 aa, Homo sapiens
  Table 3 sequence identifier: Q96GX9_C32
  MOD_RES (8)..(8): May or may not be conjugated to a chemical probe
RYLIPELCKQ

SEQ ID NO: 5216 - protein, 17 aa, Homo sapiens
  Table 3 sequence identifier: P49792_C1335
  MOD_RES (15)..(15): May or may not be conjugated to a chemical probe
RIVKEPTSHDNKDICKS

SEQ ID NO: 5217 - protein, 23 aa, Homo sapiens
  Table 3 sequence identifier: P49792_C2696
  MOD_RES (2)..(2): May or may not be conjugated to a chemical probe
KCRPLEENTADNEKECIIVWEKK

SEQ ID NO: 5218 - protein, 21 aa, Homo sapiens
  Table 3 sequence identifier: P56545_C60
  MOD_RES (9)..(9): May or may not be conjugated to a chemical probe
KDLATVAFCDAQSTQEIHEKV

SEQ ID NO: 5219 - protein, 11 aa, Homo sapiens
  Table 3 sequence identifier: Q5SRE5_C1433
  MOD_RES (5)..(5): May or may not be conjugated to a chemical probe
RTLQCLNAVRT

SEQ ID NO: 5220 - protein, 21 aa, Homo sapiens
  Table 3 sequence identifier: Q9P0L0_C128
  MOD_RES (2)..(2): May or may not be conjugated to a chemical probe
RCVFEMPNENDKLNDMEPSKA

SEQ ID NO: 5221 - protein, 28 aa, Homo sapiens
  Table 3 sequence identifier: Q9Y618_C2447
  MOD_RES (25)..(25): May or may not be conjugated to a chemical probe
KSPAPGLASGDRPPSVSSVHSEGDCNRR

SEQ ID NO: 5222 - protein, 23 aa, Homo sapiens
  Table 3 sequence identifier: Q9Y617_C175
  MOD_RES (7)..(7): May or may not be conjugated to a chemical probe
KGAVLVCDMSSNFLSKPVDVSKF

SEQ ID NO: 5223 - protein, 30 aa, Homo sapiens
  Table 3 sequence identifier: Q9Y617_C245
  MOD_RES (15)..(15): May or may not be conjugated to a chemical probe
KVQAGNSSLYNTPPCFSIYVMGLVLEWIKN

SEQ ID NO: 5224 - protein, 34 aa, Homo sapiens
  Table 3 sequence identifier: Q9UIA9_C244
  MOD_RES (24)..(24): May or may not be conjugated to a chemical probe
KLTHNCLNFDFIGTSTDESSDDLCTVQIPTSWRS

SEQ ID NO: 5225 - protein, 18 aa, Homo sapiens
  Table 3 sequence identifier: Q9H8U3_C118
  MOD_RES (3)..(3): May or may not be conjugated to a chemical probe
RSCGTDSQSENEASPVKR

SEQ ID NO: 5226 - protein, 33 aa, Homo sapiens
  Table 3 sequence identifier: O00506_C73
  MOD_RES (25)..(25): May or may not be conjugated to a chemical probe
KIIDLEEAEDEIEDIQQEITVLSQCDSPYITRY

SEQ ID NO: 5227 - protein, 15 aa, Homo sapiens
  Table 3 sequence identifier: Q4G0N4_C311
  MOD_RES (8)..(8): May or may not be conjugated to a chemical probe
KSSGLNLCTGTGSKA

SEQ ID NO: 5228 - protein, 17 aa, Homo sapiens
  Table 3 sequence identifier: Q4V328_C744
  MOD_RES (15)..(15): May or may not be conjugated to a chemical probe
KHLEVSSASMAEDLCRK

SEQ ID NO: 5229 - protein, 12 aa, Homo sapiens
  Table 3 sequence identifier: Q9BXP5_C479
  MOD_RES (4)..(4): May or may not be conjugated to a chemical probe
KEICWNLQNIRL

SEQ ID NO: 5230 - protein, 20 aa, Homo sapiens
  Table 3 sequence identifier: Q01581_C268
  MOD_RES (18)..(18): May or may not be conjugated to a chemical probe
KDFTLNDFGFMIFHSPYCKL

SEQ ID NO: 5231 - protein, 14 aa, Homo sapiens
  Table 3 sequence identifier: P46013_C643
  MOD_RES (11)..(11): May or may not be conjugated to a chemical probe
RSQHDILQMICSKR

SEQ ID NO: 5232 - protein, 13 aa, Homo sapiens
  Table 3 sequence identifier: P17858_C351
  MOD_RES (7)..(7): May or may not be conjugated to a chemical probe
RLPLMECVQMTKE

SEQ ID NO: 5233 - protein, 9 aa, Homo sapiens
  Table 3 sequence identifier: Q9H7Z7_C110
  MOD_RES (3)..(3): May or may not be conjugated to a chemical probe
KTCPFCSKV

SEQ ID NO: 5234 - protein, 8 aa, Homo sapiens
  Table 3 sequence identifier: O75083_C194
  MOD_RES (5)..(5): May or may not be conjugated to a chemical probe
RFVNCVRF

SEQ ID NO: 5235 - protein, 23 aa, Homo sapiens
  Table 3 sequence identifier: O43252_C127
  MOD_RES (10)..(10): May or may not be conjugated to a chemical probe
KLFADAGLVCITSFISPYTQDRN

SEQ ID NO: 5236 - protein, 40 aa, Homo sapiens
  Table 3 sequence identifier: Q09028_C278
  MOD_RES (21)..(21): May or may not be conjugated to a chemical probe
RSNNTSKPSHSVDAHTAEVNCLSFNPYSEFILATGSADKT

SEQ ID NO: 5237 - protein, 16 aa, Homo sapiens
  Table 3 sequence identifier: Q8WXH0_C1235
  MOD_RES (7)..(7): May or may not be conjugated to a chemical probe
KASLLLCGSDLPLHKM

SEQ ID NO: 5238 - protein, 18 aa, Homo sapiens
  Table 3 sequence identifier: Q9UPM8_C1119
  MOD_RES (4)..(4): May or may not be conjugated to a chemical probe
RSSCSTLPDYLLYQCQKV

SEQ ID NO: 5239 - protein, 37 aa, Homo sapiens
  Table 3 sequence identifier: P23368_C428
  MOD_RES (24)..(24): May or may not be conjugated to a chemical probe
RAMASINERPVIFALSNPTAQAECTAEEAYTLTEGRC

SEQ ID NO: 5240 - protein, 11 aa, Homo sapiens
  Table 3 sequence identifier: O95402_C598
  MOD_RES (9)..(9): May or may not be conjugated to a chemical probe
RLNILPYVCLD

SEQ ID NO: 5241 - protein, 29 aa, Homo sapiens
  Table 3 sequence identifier: Q8TD19_C808
  MOD_RES (23)..(23): May or may not be conjugated to a chemical probe
RGMEGLISPTEAMGNSNGASSSCPGWLRK

SEQ ID NO: 5242 - protein, 47 aa, Homo sapiens
  Table 3 sequence identifier: P11216_C109
  MOD_RES (16)..(16): May or may not be conjugated to a chemical probe
RTLQNTMVNLGLQNACDEAIYQLGLDLEELEEIEEDAGLGNGGLGRL

SEQ ID NO: 5243 - protein, 10 aa, Homo sapiens
  Table 3 sequence identifier: P40938_C11
  MOD_RES (5)..(5): May or may not be conjugated to a chemical probe
KYRPCSLGRL

SEQ ID NO: 5244 - protein, 27 aa, Homo sapiens
  Table 3 sequence identifier: P40939_C110
  MOD_RES (25)..(25): May or may not be conjugated to a chemical probe
RSAVLISSKPGCFIAGADINMLAACKT

SEQ ID NO: 5245 - protein, 13 aa, Homo sapiens
  Table 3 sequence identifier: P40939_C550
  MOD_RES (2)..(2): May or may not be conjugated to a chemical probe
RCLAPMMSEVIRI

SEQ ID NO: 5246 - protein, 25 aa, Homo sapiens
  Table 3 sequence identifier: Q8NCW5_C127
  MOD_RES (22)..(22): May or may not be conjugated to a chemical probe
RSPPTVLVICGPGNNGGDGLVCARH

SEQ ID NO: 5247 - protein, 27 aa, Homo sapiens
  Table 3 sequence identifier: Q13356_C15
  MOD_RES (6)..(6): May or may not be conjugated to a chemical probe
KMYITCAEYTHFYGGKKPDLPQTNFRR

SEQ ID NO: 5248 - protein, 11 aa, Homo sapiens
  Table 3 sequence identifier: Q5F1R6_C3
  MOD_RES (2)..(2): May or may not be conjugated to a chemical probe
KCHYEALGVRR

SEQ ID NO: 5249 - protein, 17 aa, Homo sapiens
  Table 3 sequence identifier: P40337_C77
  MOD_RES (14)..(14): May or may not be conjugated to a chemical probe
RSVNSREPSQVIFCNRS

SEQ ID NO: 5250 - protein, 22 aa, Homo sapiens
  Table 3 sequence identifier: Q8N6R0_C226
  MOD_RES (16)..(16): May or may not be conjugated to a chemical probe
KFRPVPGSALQIFELCAQEQRK

SEQ ID NO: 5251 - protein, 9 aa, Homo sapiens
  Table 3 sequence identifier: P39023_C336
  MOD_RES (3)..(3): May or may not be conjugated to a chemical probe
KGCVVGTKK

SEQ ID NO: 5252 - protein, 10 aa, Homo sapiens
  Table 3 sequence identifier: P51610_C135
  MOD_RES (7)..(7): May or may not be conjugated to a chemical probe
KNGPPPCPRL

SEQ ID NO: 5253 - protein, 19 aa, Homo sapiens
  Table 3 sequence identifier: Q12800_C453
  MOD_RES (11)..(11): May or may not be conjugated to a chemical probe
KIAQLFSISPCQISQIYKQ

SEQ ID NO: 5254 - protein, 13 aa, Homo sapiens
  Table 3 sequence identifier: Q9Y281_C39
  MOD_RES (6)..(6): May or may not be conjugated to a chemical probe
KAVLFCLSDDKRQ

SEQ ID NO: 5255 - protein, 39 aa, Homo sapiens
  Table 3 sequence identifier: Q5T4S7_C1274
  MOD_RES (27)..(27): May or may not be conjugated to a chemical probe
RNAFANDTIPSESYISAVQAAHLGTLCSQSLPLAASLKH

SEQ ID NO: 5256 - protein, 11 aa, Homo sapiens
  Table 3 sequence identifier: Q5T4S7_C2222
  MOD_RES (5)..(5): May or may not be conjugated to a chemical probe
RHTACNEQQRT

SEQ ID NO: 5257 - protein, 28 aa, Homo sapiens
  Table 3 sequence identifier: Q5T4S7_C4049
  MOD_RES (15)..(15): May or may not be conjugated to a chemical probe
KDVPVEALTTVKPYCNEIHAQAQLWLKR

SEQ ID NO: 5258 - protein, 26 aa, Homo sapiens
  Table 3 sequence identifier: O00154_C117
  MOD_RES (9)..(9): May or may not be conjugated to a chemical probe
RTDFLSPMCIGEVAHVSAEITYTSKH

SEQ ID NO: 5259 - protein, 27 aa, Homo sapiens
  Table 3 sequence identifier: Q53EZ4_C159
  MOD_RES (10)..(10): May or may not be conjugated to a chemical probe
RLSQTVAPNCFNSSINNIHEMEIQLKD

SEQ ID NO: 5260 - protein, 15 aa, Homo sapiens
  Table 3 sequence identifier: Q5VV42_C138
  MOD_RES (7)..(7): May or may not be conjugated to a chemical probe
KIVLAGCVPQAQPRQ

SEQ ID NO: 5261 - protein, 18 aa, Homo sapiens
  Table 3 sequence identifier: Q9P2A4_C145
  MOD_RES (8)..(8): May or may not be conjugated to a chemical probe
RRPLNFGCLDDIGHGIKD

SEQ ID NO: 5262 - protein, 12 aa, Homo sapiens
  Table 3 sequence identifier: Q9BRR8_C839
  MOD_RES (7)..(7): May or may not be conjugated to a chemical probe
RLPPVFCPNARQ

SEQ ID NO: 5263 - protein, 46 aa, Homo sapiens
  Table 3 sequence identifier: Q9Y3I0_C122
  MOD_RES (42)..(42): May or may not be conjugated to a chemical probe
RSIGLPDVHSGYGFAIGNMAAFDMNDPEAVVSPGGVGFDINCGVRL

SEQ ID NO: 5264 - protein, 13 aa, Homo sapiens
  Table 3 sequence identifier: P28331_C92
  MOD_RES (6)..(6): May or may not be conjugated to a chemical probe
KVVAACAMPVMKG

SEQ ID NO: 5265 - protein, 15 aa, Homo sapiens
  Table 3 sequence identifier: P62826_C122
  MOD_RES (3)..(3): May or may not be conjugated to a chemical probe
  MOD_RES (11)..(11): May or may not be conjugated to a chemical probe
RVCENIPIVLCGNKV

SEQ ID NO: 5266 - protein, 20 aa, Homo sapiens
  Table 3 sequence identifier: Q9BZE1_C153
  MOD_RES (10)..(10): May or may not be conjugated to a chemical probe
RNHIENQDECVLNVISHARL

SEQ ID NO: 5267 - protein, 13 aa, Homo sapiens
  Table 3 sequence identifier: P01033_C197
  MOD_RES (6)..(6): May or may not be conjugated to a chemical probe
REPGLCTWQSLRS

SEQ ID NO: 5268 - protein, 38 aa, Homo sapiens
  Table 3 sequence identifier: Q99661_C610
  MOD_RES (25)..(25): May or may not be conjugated to a chemical probe
KELSPHSGPSGEQLIQMETEEMEACSNGALIPGNLSKE

SEQ ID NO: 5269 - protein, 18 aa, Homo sapiens
  Table 3 sequence identifier: Q99666_C1601
  MOD_RES (2)..(2): May or may not be conjugated to a chemical probe
KCELSKNSDIEQSSDSKV

SEQ ID NO: 5270 - protein, 12 aa, Homo sapiens
  Table 3 sequence identifier: P24468_C343
  MOD_RES (4)..(4): May or may not be conjugated to a chemical probe
KSQCALEEYVRS

SEQ ID NO: 5271 - protein, 21 aa, Homo sapiens
  Table 3 sequence identifier: O60701_C288
  MOD_RES (10)..(10): May or may not be conjugated to a chemical probe
KDVLNLVYLCEALNLPEVARY

SEQ ID NO: 5272 - protein, 13 aa, Homo sapiens
  Table 3 sequence identifier: O43488_C214
  MOD_RES (10)..(10): May or may not be conjugated to a chemical probe
RQVETELFPCLRH

SEQ ID NO: 5273 - protein, 16 aa, Homo sapiens
  Table 3 sequence identifier: P53618_C102
  MOD_RES (10)..(10): May or may not be conjugated to a chemical probe
RLLHEMILVCDAYRKD

SEQ ID NO: 5274 - protein, 10 aa, Homo sapiens
  Table 3 sequence identifier: Q8WV24_C148
  MOD_RES (8)..(8): May or may not be conjugated to a chemical probe
RMLESSGCKA

SEQ ID NO: 5275 - protein, 21 aa, Homo sapiens
  Table 3 sequence identifier: Q8WV24_C266
  MOD_RES (2)..(2): May or may not be conjugated to a chemical probe
RCPQDQGWNAEITLQMVQYKN

SEQ ID NO: 5276 - protein, 19 aa, Homo sapiens
  Table 3 sequence identifier: Q8TEX9_C483
  MOD_RES (12)..(12): May or may not be conjugated to a chemical probe
KVQPYLPELMECMLQLLRN

SEQ ID NO: 5277 - protein, 13 aa, Homo sapiens
  Table 3 sequence identifier: O95433_C301
  MOD_RES (8)..(8): May or may not be conjugated to a chemical probe
KNGETELCMEGRG

SEQ ID NO: 5278 - protein, 21 aa, Homo sapiens
  Table 3 sequence identifier: P49327_C1992
  MOD_RES (17)..(17): May or may not be conjugated to a chemical probe
RDGLLENQTPEFFQDVCKPKY

SEQ ID NO: 5279 - protein, 21 aa, Homo sapiens
  Table 3 sequence identifier: Q99447_C30
  MOD_RES (7)..(7): May or may not be conjugated to a chemical probe
RVWCDGCYDMVHYGHSNQLRQ

SEQ ID NO: 5280 - protein, 14 aa, Homo sapiens
  Table 3 sequence identifier: P49321_C254
  MOD_RES (12)..(12): May or may not be conjugated to a chemical probe
KSVSGTDVQEECRE

SEQ ID NO: 5281 - protein, 17 aa, Homo sapiens
  Table 3 sequence identifier: P14618_C165
  MOD_RES (15)..(15): May or may not be conjugated to a chemical probe
KCDENILWLDYKNICKV

SEQ ID NO: 5282 - protein, 22 aa, Homo sapiens
  Table 3 sequence identifier: Q05655_C393
  MOD_RES (16)..(16): May or may not be conjugated to a chemical probe
KALKKDVVLIDDDVECTMVEKR

SEQ ID NO: 5283 - protein, 32 aa, Homo sapiens
  Table 3 sequence identifier: Q14012_C179
  MOD_RES (13)..(13): May or may not be conjugated to a chemical probe
KMEDPGSVLSTACGTPGYVAPEVLAQKPYSKA

SEQ ID NO: 5284 - protein, 26 aa, Homo sapiens
  Table 3 sequence identifier: Q15746_C1077
  MOD_RES (24)..(24): May or may not be conjugated to a chemical probe
KPDENLKSASKEELKKDVKNDVNCKR

SEQ ID NO: 5285 - protein, 22 aa, Homo sapiens
  Table 3 sequence identifier: O43353_C414
  MOD_RES (5)..(5): May or may not be conjugated to a chemical probe
KTTPCSSAIINPLSTAGNSERL

SEQ ID NO: 5286 - protein, 16 aa, Homo sapiens
  Table 3 sequence identifier: P41091_C434
  MOD_RES (9)..(9): May or may not be conjugated to a chemical probe
KIVLTNPVCTEVGEKI

SEQ ID NO: 5287 - protein, 30 aa, Homo sapiens
  Table 3 sequence identifier: Q9BQ39_C603
  MOD_RES (26)..(26): May or may not be conjugated to a chemical probe
RSLITSDKGFVTMTLESLEEIQDVSCAWKE

SEQ ID NO: 5288 - protein, 12 aa, Homo sapiens
  Table 3 sequence identifier: P13489_C38
  MOD_RES (5)..(5): May or may not be conjugated to a chemical probe
RLDDCGLTEARC

SEQ ID NO: 5289 - protein, 31 aa, Homo sapiens
  Table 3 sequence identifier: Q8TBC4_C70
  MOD_RES (29)..(29): May or may not be conjugated to a chemical probe
KKFLERSGPFTHPDFEPSTESLQFLLDTCKV

SEQ ID NO: 5290 - protein, 18 aa, Homo sapiens
  Table 3 sequence identifier: P25325_C65
  MOD_RES (14)..(14): May or may not be conjugated to a chemical probe
RHIPGAAFFDIDQCSDRT

SEQ ID NO: 5291 - protein, 30 aa, Homo sapiens
  Table 3 sequence identifier: O15287_C392
  MOD_RES (12)..(12): May or may not be conjugated to a chemical probe
RFSPPPSPPGPCMPEVFLEAAVALIQAGRA

SEQ ID NO: 5292 - protein, 18 aa, Homo sapiens
  Table 3 sequence identifier: P13804_C109
  MOD_RES (9)..(9): May or may not be conjugated to a chemical probe
KQFNYTHICAGASAFGKN

SEQ ID NO: 5293 - protein, 36 aa, Homo sapiens
  Table 3 sequence identifier: P31153_C149
  MOD_RES (25)..(25): May or may not be conjugated to a chemical probe
RNEEDIGAGDQGLMFGYATDETEECMPLTIVLAHKL

SEQ ID NO: 5294 - protein, 17 aa, Homo sapiens
  Table 3 sequence identifier: Q86V48_C594
  MOD_RES (12)..(12): May or may not be conjugated to a chemical probe
KAANGLEADNSCPNSKA

SEQ ID NO: 5295 - protein, 13 aa, Homo sapiens
  Table 3 sequence identifier: Q9UKU7_C351
  MOD_RES (8)..(8): May or may not be conjugated to a chemical probe
RKDAVALCSMAKL

SEQ ID NO: 5296 - protein, 15 aa, Homo sapiens
  Table 3 sequence identifier: Q12888_C772
  MOD_RES (6)..(6): May or may not be conjugated to a chemical probe
RVDVSCEPLEGVEKC

SEQ ID NO: 5297 - protein, 32 aa, Homo sapiens
  Table 3 sequence identifier: Q12888_C1796
  MOD_RES (16)..(16): May or may not be conjugated to a chemical probe
RAGAGYILEDFNEAQCNTAYQCLLIADQHCRT

SEQ ID NO: 5298 - protein, 22 aa, Homo sapiens
  Table 3 sequence identifier: P14923_C511
  MOD_RES (6)..(6): May or may not be conjugated to a chemical probe
RNLALCPANHAPLQEAAVIPRL

SEQ ID NO: 5299 - protein, 20 aa, Homo sapiens
  Table 3 sequence identifier: Q8NBJ5_C203
  MOD_RES (9)..(9): May or may not be conjugated to a chemical probe
RAAYSNFWCGMTSQGYYKRT

SEQ ID NO: 5300 - protein, 30 aa, Homo sapiens
  Table 3 sequence identifier: Q7LDG7_C398
  MOD_RES (10)..(10): May or may not be conjugated to a chemical probe
KSSPTSPTSCTPPPRPPVLEEWTSAAKPKL

SEQ ID NO: 5301 - protein, 10 aa, Homo sapiens
  Table 3 sequence identifier: Q56VL3_C27
  MOD_RES (7)..(7): May or may not be conjugated to a chemical probe
KQSLLFCPKS

SEQ ID NO: 5302 - protein, 38 aa, Homo sapiens
  Table 3 sequence identifier: P01591_C123
  MOD_RES (32)..(32): May or may not be conjugated to a chemical probe
KKCDPTEVELDNQIVTATQSNICDEDSATETCYTYDRN

SEQ ID NO: 5303 - protein, 62 aa, Homo sapiens
  Table 3 sequence identifier: Q9H1B7_C298
  MOD_RES (17)..(17): May or may not be conjugated to a chemical probe
RGPPTPAPPGAPGGPACLGGTPGVSATSSSASSSTSSSVAEVGVGAGGKRPGSVSSTDQERE

SEQ ID NO: 5304 - protein, 24 aa, Homo sapiens
  Table 3 sequence identifier: O00522_C134
  MOD_RES (17)..(17): May or may not be conjugated to a chemical probe
KDNTKYTYTPGCPIFYCLQDIMRV

SEQ ID NO: 5305 - protein, 29 aa, Homo sapiens
  Table 3 sequence identifier: Q9BZZ5_C234
  MOD_RES (25)..(25): May or may not be conjugated to a chemical probe
RQQLVELVAEQADLEQTFNPSDPDCVDRL

SEQ ID NO: 5306 - protein, 22 aa, Homo sapiens
  Table 3 sequence identifier: Q9H8G2_C226
  MOD_RES (13)..(13): May or may not be conjugated to a chemical probe
KMGSDLVSQQDICIDSASSVRE

SEQ ID NO: 5307 - protein, 11 aa, Homo sapiens
  Table 3 sequence identifier: O60711_C379
  MOD_RES (7)..(7): May or may not be conjugated to a chemical probe
KTYCQPCFNKL

SEQ ID NO: 5308 - protein, 26 aa, Homo sapiens
  Table 3 sequence identifier: Q6KC79_C279
  MOD_RES (15)..(15): May or may not be conjugated to a chemical probe
RNAASFPLRSPQPVCSPAGSEGTPKG

SEQ ID NO: 5309 - protein, 21 aa, Homo sapiens
  Table 3 sequence identifier: Q92974_C335
  MOD_RES (19)..(19): May or may not be conjugated to a chemical probe
RLGDLLISQFSGPSAEQMCKT

SEQ ID NO: 5310 - protein, 27 aa, Homo sapiens
  Table 3 sequence identifier: P43007_C109
  MOD_RES (23)..(23): May or may not be conjugated to a chemical probe
RMIILPLVVCSLVSGAASLDASCLGRL

SEQ ID NO: 5311 - protein, 26 aa, Homo sapiens
  Table 3 sequence identifier: Q92973_C164
  MOD_RES (3)..(3): May or may not be conjugated to a chemical probe
KICEDSAEILDSDVLDRPLNIMIPKF

SEQ ID NO: 5312 - protein, 11 aa, Homo sapiens
  Table 3 sequence identifier: Q92973_C862
  MOD_RES (9)..(9): May or may not be conjugated to a chemical probe
KDDLRDMFCKI

SEQ ID NO: 5313 - protein, 20 aa, Homo sapiens
  Table 3 sequence identifier: P54578_C359
  MOD_RES (12)..(12): May or may not be conjugated to a chemical probe
KFPLMLDMYELCTPELQEKM

SEQ ID NO: 5314 - protein, 22 aa, Homo sapiens
  Table 3 sequence identifier: Q92576_C561
  MOD_RES (5)..(5): May or may not be conjugated to a chemical probe
KIQSCNSGVKSVKNQAHSVLKK

SEQ ID NO: 5315 - protein, 21 aa, Homo sapiens
  Table 3 sequence identifier: Q13200_C285
  MOD_RES (19)..(19): May or may not be conjugated to a chemical probe
RLALMLNDMELVEDIFTSCKD

SEQ ID NO: 5316 - protein, 34 aa, Homo sapiens
  Table 3 sequence identifier: P49336_C349
  MOD_RES (27)..(27): May or may not be conjugated to a chemical probe
RITSEQAMQDPYFLEDPLPTSDVFAGCQIPYPKR

SEQ ID NO: 5317 - protein, 23 aa, Homo sapiens
  Table 3 sequence identifier: Q8IVH4_C184
  MOD_RES (12)..(12): May or may not be conjugated to a chemical probe
KLSVLAVDPSSCTSGGSLLGDKT

SEQ ID NO: 5318 - protein, 12 aa, Homo sapiens
  Table 3 sequence identifier: Q9GZR7_C832
  MOD_RES (8)..(8): May or may not be conjugated to a chemical probe
KSESALSCLSKQ

SEQ ID NO: 5319 - protein, 8 aa, Homo sapiens
  Table 3 sequence identifier: Q15149_C888
  MOD_RES (5)..(5): May or may not be conjugated to a chemical probe
RKYSCDRS

SEQ ID NO: 5320 - protein, 27 aa, Homo sapiens
  Table 3 sequence identifier: Q15149_C1405
  MOD_RES (24)..(24): May or may not be conjugated to a chemical probe
REQLRQEQALLEEIERHGEKVEECQRF

SEQ ID NO: 5321 - protein, 20 aa, Homo sapiens
  Table 3 sequence identifier: Q15149_C3493
  MOD_RES (9)..(9): May or may not be conjugated to a chemical probe
RTLLQGSGCLAGIYLEDTKE

SEQ ID NO: 5322 - protein, 12 aa, Homo sapiens
  Table 3 sequence identifier: Q15149_C3667
  MOD_RES (2)..(2): May or may not be conjugated to a chemical probe
RCVEDPETGLRL

SEQ ID NO: 5323 - protein, 25 aa, Homo sapiens
  Table 3 sequence identifier: P25787_C213
  MOD_RES (18)..(18): May or may not be conjugated to a chemical probe
KESFEGQMTEDNIEVGICNEAGFRR

SEQ ID NO: 5324 - protein, 22 aa, Homo sapiens
  Table 3 sequence identifier: Q9ULW0_C198
  MOD_RES (16)..(16): May or may not be conjugated to a chemical probe
HTVPCMPPAKRHTVPCMPPAKQ

SEQ ID NO: 5325 - protein, 21 aa, Homo sapiens
  Table 3 sequence identifier: Q9UN19_C54
  MOD_RES (13)..(13): May or may not be conjugated to a chemical probe
RHAAEALLLSNGCDGSYLLRD

SEQ ID NO: 5326 - protein, 23 aa, Homo sapiens
  Table 3 sequence identifier: P40261_C115
  MOD_RES (16)..(16): May or may not be conjugated to a chemical probe
KEPEAFDWSPVVTYVCDLEGNRV

SEQ ID NO: 5327 - protein, 26 aa, Homo sapiens
  Table 3 sequence identifier: Q9BWJ5_C41
  MOD_RES (5)..(5): May or may not be conjugated to a chemical probe
RDSYCSYMGHFDLLNYFAIAENESKA

SEQ ID NO: 5328 - protein, 13 aa, Homo sapiens
  Table 3 sequence identifier: Q9BR76_C345
  MOD_RES (3)..(3): May or may not be conjugated to a chemical probe
RKCEPIVMTVPRK

SEQ ID NO: 5329 - protein, 37 aa, Homo sapiens
  Table 3 sequence identifier: Q9HB40_C191
  MOD_RES (2)..(2): May or may not be conjugated to a chemical probe
KCNFAGVALGDSWISPVDSVLSWGPYLYSMSLLEDKG

SEQ ID NO: 5330 - protein, 21 aa, Homo sapiens
  Table 3 sequence identifier: Q9BPZ3_C60
  MOD_RES (2)..(2): May or may not be conjugated to a chemical probe
RCFQEMLEEEEEHEWFIPARD

SEQ ID NO: 5331 - protein, 15 aa, Homo sapiens
  Table 3 sequence identifier: Q96F07_C1265
  MOD_RES (2)..(2): May or may not be conjugated to a chemical probe
RCFQPPIHQSLATTC

SEQ ID NO: 5332 - protein, 16 aa, Homo sapiens
  Table 3 sequence identifier: Q8TCG1_C583
  MOD_RES (9)..(9): May or may not be conjugated to a chemical probe
CLTPHLKKCLTPHLKD

SEQ ID NO: 5333 - protein, 30 aa, Homo sapiens
  Table 3 sequence identifier: O00442_C100
  MOD_RES (7)..(7): May or may not be conjugated to a chemical probe
KTAGSVCLLMQVSMPCVLFAASPSELHLKG

SEQ ID NO: 5334 - protein, 27 aa, Homo sapiens
  Table 3 sequence identifier: P06132_C308
  MOD_RES (12)..(12): May or may not be conjugated to a chemical probe
KTVTLQGNLDPCALYASEEEIGQLVKQ

SEQ ID NO: 5335 - protein, 23 aa, Homo sapiens
  Table 3 sequence identifier: Q9NTJ3_C260
  MOD_RES (20)..(20): May or may not be conjugated to a chemical probe
KGQTEHDEGMLEYLEDIIGCGRL

SEQ ID NO: 5336 - protein, 26 aa, Homo sapiens
  Table 3 sequence identifier: Q86UU0_C68
  MOD_RES (20)..(20): May or may not be conjugated to a chemical probe
KTGNGGAQSQHQNVNQGPTCNVGSKG

SEQ ID NO: 5337 - protein, 11 aa, Homo sapiens
  Table 3 sequence identifier: Q15031_C167
  MOD_RES (5)..(5): May or may not be conjugated to a chemical probe
RLGLCFSWDRE

SEQ ID NO: 5338 - protein, 37 aa, Homo sapiens
  Table 3 sequence identifier: O15164_C394
  MOD_RES (2)..(2): May or may not be conjugated to a chemical probe
RCDASPVTNNTIQFHCDPSFWAQNIINLGSLVIEDKE

SEQ ID NO: 5339 - protein, 12 aa, Homo sapiens
  Table 3 sequence identifier: Q5VT52_C222
  MOD_RES (5)..(5): May or may not be conjugated to a chemical probe
RVDVCSTETLKC

SEQ ID NO: 5340 - protein, 10 aa, Homo sapiens
  Table 3 sequence identifier: P22314_C179
  MOD_RES (6)..(6): May or may not be conjugated to a chemical probe
RVGEFCHNRG

SEQ ID NO: 5341 - protein, 17 aa, Homo sapiens
  Table 3 sequence identifier: Q53GQ0_C215
  MOD_RES (10)..(10): May or may not be conjugated to a chemical probe
KTFVDFFSQCLHEEYRS

SEQ ID NO: 5342 - protein, 11 aa, Homo sapiens
  Table 3 sequence identifier: P78527_C223
  MOD_RES (8)..(8): May or may not be conjugated to a chemical probe
KLPVLAGCLKG

SEQ ID NO: 5343 - protein, 10 aa, Homo sapiens
  Table 3 sequence identifier: P78527_C1629
  MOD_RES (3)..(3): May or may not be conjugated to a chemical probe
KKCDSWWAKD

SEQ ID NO: 5344 - protein, 22 aa, Homo sapiens
  Table 3 sequence identifier: P42566_C824
  MOD_RES (9)..(9): May or may not be conjugated to a chemical probe
KEKDPEIFCDPFTSATTTTNKE

SEQ ID NO: 5345 - protein, 9 aa, Homo sapiens
  Table 3 sequence identifier: Q5VUJ6_C256
  MOD_RES (6)..(6): May or may not be conjugated to a chemical probe
KLDFSCNKV

SEQ ID NO: 5346 - protein, 12 aa, Homo sapiens
  Table 3 sequence identifier: Q9H4I2_C11
  MOD_RES (6)..(6): May or may not be conjugated to a chemical probe
KSTTPCMIPVKT

SEQ ID NO: 5347 - protein, 20 aa, Homo sapiens
  Table 3 sequence identifier: Q9H4I2_C335
  MOD_RES (5)..(5): May or may not be conjugated to a chemical probe
KAELCYLTVVTKYPEEQLKI

SEQ ID NO: 5348 - protein, 18 aa, Homo sapiens
  Table 3 sequence identifier: P42695_C631
  MOD_RES (10)..(10): May or may not be conjugated to a chemical probe
RGVVPVVMDCESTVQEKA

SEQ ID NO: 5349 - protein, 42 aa, Homo sapiens
  Table 3 sequence identifier: Q96HE7_C104
  MOD_RES (9)..(9): May or may not be conjugated to a chemical probe
RRDCAVKPCQSDEVPDGIKSASYKYSEEANNLIEECEQAERL

SEQ ID NO: 5350 - protein, 11 aa, Homo sapiens
  Table 3 sequence identifier: Q53HL2_C273
  MOD_RES (6)..(6): May or may not be conjugated to a chemical probe
RLAQICSSIRT

SEQ ID NO: 5351 - protein, 22 aa, Homo sapiens
  Table 3 sequence identifier: Q9Y2L5_C265
  MOD_RES (15)..(15): May or may not be conjugated to a chemical probe
KNSIQNQESYEDGPCTITSNKN

SEQ ID NO: 5352 - protein, 31 aa, Homo sapiens
  Table 3 sequence identifier: Q04721_C2085
  MOD_RES (26)..(26): May or may not be conjugated to a chemical probe
RLLDEYNVTPSPPGTVLTSALSPVICGPNRS

SEQ ID NO: 5353 - protein, 11 aa, Homo sapiens
  Table 3 sequence identifier: Q04726_C26
  MOD_RES (8)..(8): May or may not be conjugated to a chemical probe
KFTVAESCDRI

SEQ ID NO: 5354 - protein, 13 aa, Homo sapiens
  Table 3 sequence identifier: Q6P2E9_C838
  MOD_RES (4)..(4): May or may not be conjugated to a chemical probe
RETCSTLAESPRN

SEQ ID NO: 5355 - protein, 17 aa, Homo sapiens
  Table 3 sequence identifier: Q99567_C454
  MOD_RES (9)..(9): May or may not be conjugated to a chemical probe
KCFVEHILCTKPLPCRQ

SEQ ID NO: 5356 - protein, 13 aa, Homo sapiens
  Table 3 sequence identifier: P49189_C45
  MOD_RES (8)..(8): May or may not be conjugated to a chemical probe
RVIATFTCSGEKE

SEQ ID NO: 5357 - protein, 17 aa, Homo sapiens
  Table 3 sequence identifier: Q14789_C3070
  MOD_RES (9)..(9): May or may not be conjugated to a chemical probe
KNTLSIQLCDTSQSLRE

SEQ ID NO: 5358 - protein, 26 aa, Homo sapiens
  Table 3 sequence identifier: Q14789_C3144
  MOD_RES (22)..(22): May or may not be conjugated to a chemical probe
KSDPEELREPQQSFSEAQQQLCNTRQ

SEQ ID NO: 5359 - protein, 18 aa, Homo sapiens
  Table 3 sequence identifier: O43592_C38
  MOD_RES (10)..(10): May or may not be conjugated to a chemical probe
KISPDAWQVCAEALAQRT

SEQ ID NO: 5360 - protein, 39 aa, Homo sapiens
  Table 3 sequence identifier: O43592_C938
  MOD_RES (29)..(29): May or may not be conjugated to a chemical probe
KRGPECVQYLQQEYLPSLQVAPEIIQEFCQALQQPDAKV

SEQ ID NO: 5361 - protein, 12 aa, Homo sapiens
  Table 3 sequence identifier: Q9NUQ8_C102
  MOD_RES (8)..(8): May or may not be conjugated to a chemical probe
KITENYDCGTKL

SEQ ID NO: 5362 - protein, 15 aa, Homo sapiens
  Table 3 sequence identifier: P20810_C328
  MOD_RES (2)..(2): May or may not be conjugated to a chemical probe
KCGEDDETIPSEYRL

SEQ ID NO: 5363 - protein, 18 aa, Homo sapiens
  Table 3 sequence identifier: P33176_C174
  MOD_RES (4)..(4): May or may not be conjugated to a chemical probe
RFVCSPDEVMDTIDEGKS

SEQ ID NO: 5364 - protein, 48 aa, Homo sapiens
  Table 3 sequence identifier: Q9GZQ3_C117
  MOD_RES (8)..(8): May or may not be conjugated to a chemical probe
RDQLQELCIPQDLVGDLASVVFGSQRPLLDSVAQQQGAWLPHVADFRW

SEQ ID NO: 5365 - protein, 11 aa, Homo sapiens
  Table 3 sequence identifier: P49454_C2415
  MOD_RES (4)..(4): May or may not be conjugated to a chemical probe
KQLCVLQQLKE

SEQ ID NO: 5366 - protein, 43 aa, Homo sapiens
  Table 3 sequence identifier: Q76N89_C1574
  MOD_RES (11)..(11): May or may not be conjugated to a chemical probe
KITSLPRAHTCFNRLDLPPYPSYSMLYEKLLTAVEETSTFGLE

SEQ ID NO: 5367 - protein, 12 aa, Homo sapiens
  Table 3 sequence identifier: Q9NQZ5_C362
  MOD_RES (7)..(7): May or may not be conjugated to a chemical probe
RKNEGSCGPARI

SEQ ID NO: 5368 - protein, 31 aa, Homo sapiens
  Table 3 sequence identifier: Q9BQ15_C99
  MOD_RES (6)..(6): May or may not be conjugated to a chemical probe
KIGEFCMVYSEVPNFSEPNPEYSTQQAPNKA

SEQ ID NO: 5369 - protein, 21 aa, Homo sapiens
  Table 3 sequence identifier: Q12905_C37
  MOD_RES (14)..(14): May or may not be conjugated to a chemical probe
RPFVPHIPFDFYLCEMAFPRV

SEQ ID NO: 5370 - protein, 19 aa, Homo sapiens
  Table 3 sequence identifier: P04406_C158
  MOD_RES (8)..(8): May or may not be conjugated to a chemical probe
  MOD_RES (12)..(12): May or may not be conjugated to a chemical probe
KIISNASCTTNCLAPLAKV

SEQ ID NO: 5371 - protein, 25 aa, Homo sapiens
  Table 3 sequence identifier: P11177_C306
  MOD_RES (22)..(22): May or may not be conjugated to a chemical probe
KTNHLVTVEGGWPQFGVGAEICARI

SEQ ID NO: 5372 - protein, 14 aa, Homo sapiens
  Table 3 sequence identifier: E7EQZ4_C60
  MOD_RES (6)..(6): May or may not be conjugated to a chemical probe
KNGDICETSGKPKT

SEQ ID NO: 5373 - protein, 22 aa, Homo sapiens
  Table 3 sequence identifier: Q6UN15_C216
  MOD_RES (7)..(7): May or may not be conjugated to a chemical probe
KITAEDCTMEVTPGAEIQDGRF

SEQ ID NO: 5374 - protein, 27 aa, Homo sapiens
  Table 3 sequence identifier: Q96GJ1_C289
  MOD_RES (2)..(2): May or may not be conjugated to a chemical probe
RCSHQQSPYQLLFGEPYIFEELLSLKI

SEQ ID NO: 5375 - protein, 14 aa, Homo sapiens
  Table 3 sequence identifier: Q9UEW8_C450
  MOD_RES (6)..(6): May or may not be conjugated to a chemical probe
REASSCAVNLVLRL

SEQ ID NO: 5376 - protein, 39 aa, Homo sapiens
  Table 3 sequence identifier: Q15785_C236
  MOD_RES (26)..(26): May or may not be conjugated to a chemical probe
KAIEKYSESLLCSNLESATYSNRALCYLVLKQYTEAVKD

SEQ ID NO: 5377 - protein, 10 aa, Homo sapiens
  Table 3 sequence identifier: Q5T160_C11
  MOD_RES (5)..(5): May or may not be conjugated to a chemical probe
RAIACQLSRV

SEQ ID NO: 5378 - protein, 28 aa, Homo sapiens
  Table 3 sequence identifier: P40692_C142
  MOD_RES (7)..(7): May or may not be conjugated to a chemical probe
KAPPKPCAGNQGTQITVEDLFYNIATRR

SEQ ID NO: 5379 - protein, 22 aa, Homo sapiens
  Table 3 sequence identifier: Q15283_C314
  MOD_RES (5)..(5): May or may not be conjugated to a chemical probe
RLNICYTEDYVLPSEYYGPLKT

SEQ ID NO: 5380 - protein, 18 aa, Homo sapiens
  Table 3 sequence identifier: Q96I25_C302
  MOD_RES (14)..(14): May or may not be conjugated to a chemical probe
KKSDSNPLTEILKCPTKV

SEQ ID NO: 5381 - protein, 10 aa, Homo sapiens
  Table 3 sequence identifier: Q96I25_C385
  MOD_RES (3)..(3): May or may not be conjugated to a chemical probe
KACFYNLDKF

SEQ ID NO: 5382 - protein, 14 aa, Homo sapiens
  Table 3 sequence identifier: Q15334_C505
  MOD_RES (4)..(4): May or may not be conjugated to a chemical probe
KVGCFDPYSDDPRL

SEQ ID NO: 5383 - protein, 22 aa, Homo sapiens
  Table 3 sequence identifier: Q712K3_C191
  MOD_RES (19)..(19): May or may not be conjugated to a chemical probe
KAEAEKDGVKVPTTLAEYCIKT

SEQ ID NO: 5384 - protein, 33 aa, Homo sapiens
  Table 3 sequence identifier: O95373_C90
  MOD_RES (30)..(30): May or may not be conjugated to a chemical probe
KNMITQYWPDRETAPGDISPYTIPEEDRHCIRE

SEQ ID NO: 5385 - protein, 12 aa, Homo sapiens
  Table 3 sequence identifier: Q9BV44_C426
  MOD_RES (9)..(9): May or may not be conjugated to a chemical probe
RNWNLYPACLRE

SEQ ID NO: 5386 - protein, 17 aa, Homo sapiens
  Table 3 sequence identifier: O14578_C105
  MOD_RES (6)..(6): May or may not be conjugated to a chemical probe
RSLVGCGHFAEVQVVRE

SEQ ID NO: 5387 - protein, 19 aa, Homo sapiens
  Table 3 sequence identifier: O14579_C34
  MOD_RES (12)..(12): May or may not be conjugated to a chemical probe
KNAFYIGSYQQCINEAQRV

SEQ ID NO: 5388 - protein, 30 aa, Homo sapiens
  Table 3 sequence identifier: Q9NXW9_C204
  MOD_RES (10)..(10): May or may not be conjugated to a chemical probe
REAPGSLLLCSAPSAAPEALVDSVIAPSRS

SEQ ID NO: 5389 - protein, 21 aa, Homo sapiens
  Table 3 sequence identifier: Q9Y2H0_C736
  MOD_RES (6)..(6): May or may not be conjugated to a chemical probe
RSLPDCTPHPNSISIDAGPRQ

SEQ ID NO: 5390 - protein, 20 aa, Homo sapiens
  Table 3 sequence identifier: Q96CV9_C239
  MOD_RES (17)..(17): May or may not be conjugated to a chemical probe
KNYFEHEELTVSQLLLCLRE

SEQ ID NO: 5391 - protein, 16 aa, Homo sapiens
  Table 3 sequence identifier: Q9Y3L3_C102
  MOD_RES (7)..(7): May or may not be conjugated to a chemical probe
KALEMSCAIQNQLARI

SEQ ID NO: 5392 - protein, 28 aa, Homo sapiens
  Table 3 sequence identifier: Q96EV2_C1093
  MOD_RES (5)..(5): May or may not be conjugated to a chemical probe
RVVECKPQPCVVSVEGLSSSTTDAQLKS

SEQ ID NO: 5393 - protein, 18 aa, Homo sapiens
  Table 3 sequence identifier: Q9UM54_C1102
  MOD_RES (8)..(8): May or may not be conjugated to a chemical probe
RDTINTSCDIELLAACRE

SEQ ID NO: 5394 - protein, 13 aa, Homo sapiens
  Table 3 sequence identifier: Q15027_C64
  MOD_RES (8)..(8): May or may not be conjugated to a chemical probe
RAFVVGICDLARL

SEQ ID NO: 5395 - protein, 17 aa, Homo sapiens
  Table 3 sequence identifier: O00541_C391
  MOD_RES (2)..(2): May or may not be conjugated to a chemical probe
RCYVQPQWVFDSVNARL

SEQ ID NO: 5396 - protein, 21 aa, Homo sapiens
  Table 3 sequence identifier: Q9Y277_C36
  MOD_RES (3)..(3): May or may not be conjugated to a chemical probe
KSCSGVEFSTSGHAYTDTGKA

SEQ ID NO: 5397 - protein, 8 aa, Homo sapiens
  Table 3 sequence identifier: Q9Y277_C229
  MOD_RES (6)..(6): May or may not be conjugated to a chemical probe
KYMLDCRT

SEQ ID NO: 5398 - protein, 24 aa, Homo sapiens
  Table 3 sequence identifier: Q8NI27_C743
  MOD_RES (16)..(16): May or may not be conjugated to a chemical probe
RLKDALLDHDLALPLCLLMAQQRN

SEQ ID NO: 5399 - protein, 27 aa, Homo sapiens
  Table 3 sequence identifier: O76094_C349
  MOD_RES (25)..(25): May or may not be conjugated to a chemical probe
KISASLQSQSPEHLLPVLIQAAQLCRE

SEQ ID NO: 5400 - protein, 13 aa, Homo sapiens
  Table 3 sequence identifier: Q14315_C1348
  MOD_RES (8)..(8): May or may not be conjugated to a chemical probe
RVGVTEGCDPTRV

SEQ ID NO: 5401 - protein, 34 aa, Homo sapiens
  Table 3 sequence identifier: Q14315_C1735
  MOD_RES (17)..(17): May or may not be conjugated to a chemical probe
RFGGEHIPNSPFHVLACDPLPHEEEPSEVPQLRQ

SEQ ID NO: 5402 - protein, 36 aa, Homo sapiens
  Table 3 sequence identifier: Q09666_C1967
  MOD_RES (31)..(31): May or may not be conjugated to a chemical probe
KGDVDVSVPKLEGDLTGPSVGVEVPDVELECPDAKL

SEQ ID NO: 5403 - protein, 9 aa, Homo sapiens
  Table 3 sequence identifier: P14621_C22
  MOD_RES (6)..(6): May or may not be conjugated to a chemical probe
RVQGVCFRM

SEQ ID NO: 5404 - protein, 21 aa, Homo sapiens
  Table 3 sequence identifier: Q12974_C101
  MOD_RES (14)..(14): May or may not be conjugated to a chemical probe
KFREEPGCCVAVHCVAGLGRA

SEQ ID NO: 5405 - protein, 14 aa, Homo sapiens
  Table 3 sequence identifier: O75334_C143
  MOD_RES (9)..(9): May or may not be conjugated to a chemical probe
RLLLEHLECLVSRH

SEQ ID NO: 5406 - protein, 17 aa, Homo sapiens
  Table 3 sequence identifier: O14979_C277
  MOD_RES (4)..(4): May or may not be conjugated to a chemical probe
RGFCFITYTDEEPVKKL

SEQ ID NO: 5407 - protein, 28 aa, Homo sapiens
  Table 3 sequence identifier: Q8WUM0_C1037
  MOD_RES (22)..(22): May or may not be conjugated to a chemical probe
KQLNLSAMPVLTAPQLIGLYICEENRRA

SEQ ID NO: 5408 - protein, 22 aa, Homo sapiens
  Table 3 sequence identifier: Q96PN7_C876
  MOD_RES (2)..(2): May or may not be conjugated to a chemical probe
KCHPLANYHYAGSDKWTSLERK

SEQ ID NO: 5409 - protein, 13 aa, Homo sapiens
  Table 3 sequence identifier: Q9H9A6_C54
  MOD_RES (9)..(9): May or may not be conjugated to a chemical probe
RNLSEVPQCVWRI

SEQ ID NO: 5410 - protein, 8 aa, Homo sapiens
  Table 3 sequence identifier: Q01167_C357
  MOD_RES (5)..(5): May or may not be conjugated to a chemical probe
RGVPCFRT

SEQ ID NO: 5411 - protein, 18 aa, Homo sapiens
  Table 3 sequence identifier: Q13310_C128
  MOD_RES (16)..(16): May or may not be conjugated to a chemical probe
KALYDTFSAFGNILSCKV

SEQ ID NO: 5412 - protein, 18 aa, Homo sapiens
  Table 3 sequence identifier: P06493_C119
  MOD_RES (14)..(14): May or may not be conjugated to a chemical probe
KSYLYQILQGIVFCHSRR

SEQ ID NO: 5413 - protein, 8 aa, Homo sapiens
  Table 3 sequence identifier: P62937_C52
  MOD_RES (4)..(4): May or may not be conjugated to a chemical probe
KGSCFHRI

SEQ ID NO: 5414 - protein, 25 aa, Homo sapiens
  Table 3 sequence identifier: Q9UBQ5_C190
  MOD_RES (15)..(15): May or may not be conjugated to a chemical probe
KYGWSADESGQIFICSQEESIKPKN

SEQ ID NO: 5415 - protein, 30 aa, Homo sapiens
  Table 3 sequence identifier: Q9NY93_C298
  MOD_RES (2)..(2): May or may not be conjugated to a chemical probe
RCHIISQFNQGFYDCVIATDAEVLGAPVKG

SEQ ID NO: 5416 - protein, 11 aa, Homo sapiens
  Table 3 sequence identifier: P50453_C370
  MOD_RES (8)..(8): May or may not be conjugated to a chemical probe
RANSILFCGRF

SEQ ID NO: 5417 - protein, 10 aa, Homo sapiens
  Table 3 sequence identifier: P12236_C160
  MOD_RES (6)..(6): May or may not be conjugated to a chemical probe
RGLGDCLVKI

SEQ ID NO: 5418 - protein, 9 aa, Homo sapiens
  Table 3 sequence identifier: Q6ZRQ5_C1068
  MOD_RES (2)..(2): May or may not be conjugated to a chemical probe
KCIVQVIRK

SEQ ID NO: 5419 - protein, 27 aa, Homo sapiens
  Table 3 sequence identifier: Q9BYI3_C371
  MOD_RES (18)..(18): May or may not be conjugated to a chemical probe
RAASSTSQSGLSNSSHNCSNKPSIGKN

SEQ ID NO: 5420 - protein, 30 aa, Homo sapiens
  Table 3 sequence identifier: P51148_C64
  MOD_RES (22)..(22): May or may not be conjugated to a chemical probe
KGQFHEYQESTIGAAFLTQTVCLDDTTVKF

SEQ ID NO: 5421 - protein, 30 aa, Homo sapiens
  Table 3 sequence identifier: P09110_C87
  MOD_RES (14)..(14): May or may not be conjugated to a chemical probe
KDVNLRPEQLGDICVGNVLQPGAGAIMARI

SEQ ID NO: 5422 - protein, 27 aa, Homo sapiens
  Table 3 sequence identifier: Q9UL15_C118
  MOD_RES (11)..(11): May or may not be conjugated to a chemical probe
KIVPFYNGGNCVTDEFEEGIQDIILRL

SEQ ID NO: 5423 - protein, 20 aa, Homo sapiens
  Table 3 sequence identifier: Q9UL12_C497
  MOD_RES (14)..(14): May or may not be conjugated to a chemical probe
RRDPLHEELLGQGCVFQERH

SEQ ID NO: 5424 - protein, 39 aa, Homo sapiens
  Table 3 sequence identifier: Q96CG3_C169
  MOD_RES (24)..(24): May or may not be conjugated to a chemical probe
RSLLQENNWPPHRPIPEYGTYSLCSSQSSSPTEMDENES

SEQ ID NO: 5425 - protein, 10 aa, Homo sapiens
  Table 3 sequence identifier: O60841_C853
  MOD_RES (5)..(5): May or may not be conjugated to a chemical probe
RLAHCEELRA

SEQ ID NO: 5426 - protein, 17 aa, Homo sapiens
  Table 3 sequence identifier: Q15306_C19
  MOD_RES (12)..(12): May or may not be conjugated to a chemical probe
RGGEFGMSAVSCGNGKL

SEQ ID NO: 5427 - protein, 20 aa, Homo sapiens
  Table 3 sequence identifier: Q9Y265_C94
  MOD_RES (5)..(5): May or may not be conjugated to a chemical probe
KVPFCPMVGSEVYSTEIKKT

SEQ ID NO: 5428 - protein, 12 aa, Homo sapiens
  Table 3 sequence identifier: Q9Y263_C193
  MOD_RES (9)..(9): May or may not be conjugated to a chemical probe
RTFSGHEDCVRG

SEQ ID NO: 5429 - protein, 23 aa, Homo sapiens
  Table 3 sequence identifier: Q9UBZ4_C27
  MOD_RES (15)..(15): May or may not be conjugated to a chemical probe
RRPLQGVANQEPSNCAAVAVGRI

SEQ ID NO: 5430 - protein, 23 aa, Homo sapiens
  Table 3 sequence identifier: O75528_C255
  MOD_RES (14)..(14): May or may not be conjugated to a chemical probe
KKSEAQHEQPEDGCPFGALTQRL

SEQ ID NO: 5431 - protein, 9 aa, Homo sapiens
  Table 3 sequence identifier: Q14997_C710
  MOD_RES (7)..(7): May or may not be conjugated to a chemical probe
RTLHLTCKQ

SEQ ID NO: 5432 - protein, 14 aa, Homo sapiens
  Table 3 sequence identifier: Q9P107_C895
  MOD_RES (3)..(3): May or may not be conjugated to a chemical probe
KLCEETPITSVPRG

SEQ ID NO: 5433 - protein, 10 aa, Homo sapiens
  Table 3 sequence identifier: P35579_C740
  MOD_RES (4)..(4): May or may not be conjugated to a chemical probe
KQACVLMIKA

SEQ ID NO: 5434 - protein, 16 aa, Homo sapiens
  Table 3 sequence identifier: Q8TAQ2_C91
  MOD_RES (7)..(7): May or may not be conjugated to a chemical probe
KAGGSLCHILAAAYKF

SEQ ID NO: 5435 - protein, 19 aa, Homo sapiens
  Table 3 sequence identifier: O14966_C120
  MOD_RES (12)..(12): May or may not be conjugated to a chemical probe
KLTLPNGEPVPCLLLANKC

SEQ ID NO: 5436 - protein, 26 aa, Homo sapiens
  Table 3 sequence identifier: Q13325_C137
  MOD_RES (12)..(12): May or may not be conjugated to a chemical probe
KLSSPSNYKLECPETDCEKGWALLKF

SEQ ID NO: 5437 - protein, 9 aa, Homo sapiens
  Table 3 sequence identifier: Q7Z7A3_C290
  MOD_RES (2)..(2): May or may not be conjugated to a chemical probe
RCGALASRA

SEQ ID NO: 5438 - protein, 22 aa, Homo sapiens
  Table 3 sequence identifier: Q9ULT8_C2579
  MOD_RES (16)..(16): May or may not be conjugated to a chemical probe
RKVDATDASYPSVNTCVHYLKL

SEQ ID NO: 5439 - protein, 20 aa, Homo sapiens
  Table 3 sequence identifier: Q0VG06_C15
  MOD_RES (7)..(7): May or may not be conjugated to a chemical probe
RYLAGFCCPLGGLAAGKPRV

SEQ ID NO: 5440 - protein, 9 aa, Homo sapiens
  Table 3 sequence identifier: Q13439_C1253
  MOD_RES (5)..(5): May or may not be conjugated to a chemical probe
RISHCQHRT

SEQ ID NO: 5441 - protein, 10 aa, Homo sapiens
  Table 3 sequence identifier: Q9UPT9_C494
  MOD_RES (2)..(2): May or may not be conjugated to a chemical probe
KCDDAIITKA

SEQ ID NO: 5442 - protein, 21 aa, Homo sapiens
  Table 3 sequence identifier: Q9HCJ3_C362
  MOD_RES (18)..(18): May or may not be conjugated to a chemical probe
KSLNNPAMLQVLLQPQLCGRA

SEQ ID NO: 5443 - protein, 23 aa, Homo sapiens
  Table 3 sequence identifier: O60306_C28
  MOD_RES (21)..(21): May or may not be conjugated to a chemical probe
KKIVAPTVSQINAEFVTQLACKY

SEQ ID NO: 5444 - protein, 12 aa, Homo sapiens
  Table 3 sequence identifier: Q92879_C61
  MOD_RES (3)..(3): May or may not be conjugated to a chemical probe
KGCCFVTFYTRK

SEQ ID NO: 5445 - protein, 22 aa, Homo sapiens
  Table 3 sequence identifier: P10620_C50
  MOD_RES (10)..(10): May or may not be conjugated to a chemical probe
RKVFANPEDCVAFGKGENAKKY

SEQ ID NO: 5446 - protein, 13 aa, Homo sapiens
  Table 3 sequence identifier: P01892_C125
  MOD_RES (5)..(5): May or may not be conjugated to a chemical probe
RMYGCDVGSDWRF

SEQ ID NO: 5447 - protein, 27 aa, Homo sapiens
  Table 3 sequence identifier: Q9Y312_C370
  MOD_RES (13)..(13): May or may not be conjugated to a chemical probe
KFRWDFAAEPEDCAPVVVELPEGIEMG

SEQ ID NO: 5448 - protein, 25 aa, Homo sapiens
  Table 3 sequence identifier: P55265_C392
  MOD_RES (8)..(8): May or may not be conjugated to a chemical probe
RNAEFLTCNIPTSNASNNMVTTEKV

SEQ ID NO: 5449 - protein, 19 aa, Homo sapiens
  Table 3 sequence identifier: P60900_C78
  MOD_RES (8)..(8): May or may not be conjugated to a chemical probe
KITENIGCVMTGMTADSRS

SEQ ID NO: 5450 - protein, 22 aa, Homo sapiens
  Table 3 sequence identifier: Q63ZY3_C249
  MOD_RES (5)..(5): May or may not be conjugated to a chemical probe
RSELCLDLPDPPEDPVALETRS

SEQ ID NO: 5451 - protein, 34 aa, Homo sapiens
  Table 3 sequence identifier: Q63ZY3_C412
  MOD_RES (3)..(3): May or may not be conjugated to a chemical probe
RSCDGAAGLPEVPAESSSSPPGSEVASLTQPEKS

SEQ ID NO: 5452 - protein, 20 aa, Homo sapiens
  Table 3 sequence identifier: O95159_C230
  MOD_RES (13)..(13): May or may not be conjugated to a chemical probe
RDDDRTPGLHGDCDDDKYRR

SEQ ID NO: 5453 - protein, 20 aa, Homo sapiens
  Table 3 sequence identifier: P62873_C294
  MOD_RES (12)..(12): May or may not be conjugated to a chemical probe
RLLLAGYDDFNCNVWDALKA

SEQ ID NO: 5454 - protein, 12 aa, Homo sapiens
  Table 3 sequence identifier: O00567_C211
  MOD_RES (10)..(10): May or may not be conjugated to a chemical probe
KIINDNATYCRL

SEQ ID NO: 5455 - protein, 26 aa, Homo sapiens
  Table 3 sequence identifier: Q15003_C397
  MOD_RES (7)..(7): May or may not be conjugated to a chemical probe
RSWKEPCQVQSCQEEMISLGDGDIRT

SEQ ID NO: 5456 - protein, 10 aa, Homo sapiens
  Table 3 sequence identifier: Q9C0C2_C136
  MOD_RES (2)..(2): May or may not be conjugated to a chemical probe
RCAAPGGVRK

SEQ ID NO: 5457 - protein, 11 aa, Homo sapiens
  Table 3 sequence identifier: Q9C0C9_C1099
  MOD_RES (2)..(2): May or may not be conjugated to a chemical probe
RCYNEMALIRV

SEQ ID NO: 5458 - protein, 22 aa, Homo sapiens
  Table 3 sequence identifier: Q12841_C233
  MOD_RES (2)..(2): May or may not be conjugated to a chemical probe
KCALEDETYADGAETEVDCNRC

SEQ ID NO: 5459 - protein, 9 aa, Homo sapiens
  Table 3 sequence identifier: O75533_C1244
  MOD_RES (7)..(7): May or may not be conjugated to a chemical probe
RVAIGPCRM

SEQ ID NO: 5460 - protein, 18 aa, Homo sapiens
  Table 3 sequence identifier: O75534_C106
  MOD_RES (8)..(8): May or may not be conjugated to a chemical probe
RMNGQVVCAVPHNLESKS

SEQ ID NO: 5461 - protein, 20 aa, Homo sapiens
  Table 3 sequence identifier: E7EVK2_C211
  MOD_RES (14)..(14): May or may not be conjugated to a chemical probe
RFGYVQHYGLGSACDNVERV

SEQ ID NO: 5462 - protein, 20 aa, Homo sapiens
  Table 3 sequence identifier: Q13158_C168
  MOD_RES (3)..(3): May or may not be conjugated to a chemical probe
RSCQMNLVADLVQEVQQARD

SEQ ID NO: 5463 - protein, 17 aa, Homo sapiens
  Table 3 sequence identifier: Q9NRA8_C125
  MOD_RES (7)..(7): May or may not be conjugated to a chemical probe
RSFGGGCHVTAAVSSRR

SEQ ID NO: 5464 - protein, 19 aa, Homo sapiens
  Table 3 sequence identifier: Q13155_C205
  MOD_RES (8)..(8): May or may not be conjugated to a chemical probe
KFSIQTMCPIEGEGNIARF

SEQ ID NO: 5465 - protein, 16 aa, Homo sapiens
  Table 3 sequence identifier: Q14192_C10
  MOD_RES (7)..(7): May or may not be conjugated to a chemical probe
RFDCHHCNESLFGKKY

SEQ ID NO: 5466 - protein, 14 aa, Homo sapiens
  Table 3 sequence identifier: Q8TEU7_C93
  MOD_RES (9)..(9): May or may not be conjugated to a chemical probe
KGSMVLPPCSFGKQ

SEQ ID NO: 5467 - protein, 18 aa, Homo sapiens
  Table 3 sequence identifier: Q14204_C978
  MOD_RES (16)..(16): May or may not be conjugated to a chemical probe
RITNQVIYLNPPIEECRY

SEQ ID NO: 5468 - protein, 9 aa, Homo sapiens
  Table 3 sequence identifier: Q14204_C4644
  MOD_RES (7)..(7): May or may not be conjugated to a chemical probe
RGVAVLCTE

SEQ ID NO: 5469 - protein, 13 aa, Homo sapiens
  Table 3 sequence identifier: O60684_C296
  MOD_RES (11)..(11): May or may not be conjugated to a chemical probe
KIQAVIDSGVCRR

SEQ ID NO: 5470 - protein, 14 aa, Homo sapiens
  Table 3 sequence identifier: Q92844_C318
  MOD_RES (11)..(11): May or may not be conjugated to a chemical probe
KTKPSNLVNTCIRT

SEQ ID NO: 5471 - protein, 9 aa, Homo sapiens
  Table 3 sequence identifier: Q9Y4H4_C160
  MOD_RES (9)..(9): May or may not be conjugated to a chemical probe
RSRPPTHTC

SEQ ID NO: 5472 - protein, 12 aa, Homo sapiens
  Table 3 sequence identifier: Q8WXI9_C423
  MOD_RES (10)..(10): May or may not be conjugated to a chemical probe
RVEPFVCAQCRT

SEQ ID NO: 5473 - protein, 23 aa, Homo sapiens
  Table 3 sequence identifier: P22102_C93
  MOD_RES (7)..(7): May or may not be conjugated to a chemical probe
RSAGVQCFGPTAEAAQLESSKRF

SEQ ID NO: 5474 - protein, 22 aa, Homo sapiens
  Table 3 sequence identifier: P32320_C102
  MOD_RES (20)..(20): May or may not be conjugated to a chemical probe
RAIAIASDMQDDFISPCGACRQ

SEQ ID NO: 5475 - protein, 28 aa, Homo sapiens
  Table 3 sequence identifier: Q13085_C1116
  MOD_RES (21)..(21): May or may not be conjugated to a chemical probe
RHNQVESIFLSAIDMYGHQFCIENLQKL

SEQ ID NO: 5476 - protein, 18 aa, Homo sapiens
  Table 3 sequence identifier: Q14511_C18
  MOD_RES (10)..(10): May or may not be conjugated to a chemical probe
RALYDNVPECAEELAFRK

SEQ ID NO: 5477 - protein, 21 aa, Homo sapiens
  Table 3 sequence identifier: O95551_C273
  MOD_RES (2)..(2): May or may not be conjugated to a chemical probe
RCGGLPNNIVDVWEFLGKPKH

SEQ ID NO: 5478 - protein, 11 aa, Homo sapiens
  Table 3 sequence identifier: Q13330_C68
  MOD_RES (8)..(8): May or may not be conjugated to a chemical probe
KHATLSVCYKA

SEQ ID NO: 5479 - protein, 29 aa, Homo sapiens
  Table 3 sequence identifier: A6NJ78_C172
  MOD_RES (18)..(18): May or may not be conjugated to a chemical probe
KAGVQPGTFDGVLMDLGCSSMQLDTPERG

SEQ ID NO: 5480 - protein, 14 aa, Homo sapiens
  Table 3 sequence identifier: O43491_C424
  MOD_RES (5)..(5): May or may not be conjugated to a chemical probe
KLGVCANGLLIYKD

SEQ ID NO: 5481 - protein, 22 aa, Homo sapiens
  Table 3 sequence identifier: P82663_C141
  MOD_RES (5)..(5): May or may not be conjugated to a chemical probe
RECICEVEGQVPCPSLVPLPKE

SEQ ID NO: 5482 - protein, 25 aa, Homo sapiens
  Table 3 sequence identifier: Q13428_C1012
  MOD_RES (18)..(18): May or may not be conjugated to a chemical probe
RSSSSESEDEDVIPATQCLTPGIRT

SEQ ID NO: 5483 - protein, 32 aa, Homo sapiens
  Table 3 sequence identifier: Q5JSP0_C43
  MOD_RES (4)..(4): May or may not be conjugated to a chemical probe
RAHCGDPVSLAAAGDGSPDIGPTGELSGSLKI

SEQ ID NO: 5484 - protein, 11 aa, Homo sapiens
  Table 3 sequence identifier: Q14847_C32
  MOD_RES (6)..(6): May or may not be conjugated to a chemical probe
KACFHCETCKM

SEQ ID NO: 5485 - protein, 24 aa, Homo sapiens
  Table 3 sequence identifier: Q9UHB7_C315
  MOD_RES (17)..(17): May or may not be conjugated to a chemical probe
KIPSQPLDASASGDVSCVDEILKE

SEQ ID NO: 5486 - protein, 15 aa, Homo sapiens
  Table 3 sequence identifier: P48735_C402
  MOD_RES (3)..(3): May or may not be conjugated to a chemical probe
KVCVETVESGAMTKD

SEQ ID NO: 5487 - protein, 24 aa, Homo sapiens
  Table 3 sequence identifier: Q2TAL8_C529
  MOD_RES (19)..(19): May or may not be conjugated to a chemical probe
RFQEDLISSAVAELNYGLCLMTRE

SEQ ID NO: 5488 - protein, 19 aa, Homo sapiens
  Table 3 sequence identifier: Q9UJM3_C124
  MOD_RES (8)..(8): May or may not be conjugated to a chemical probe
KLTVNGVCASTPPLTPIKN

SEQ ID NO: 5489 - protein, 34 aa, Homo sapiens
  Table 3 sequence identifier: Q7L1V2_C87
  MOD_RES (14)..(14): May or may not be conjugated to a chemical probe
RLWSPAAPENSPTCSPESSSGGQGGDPSDEEWRS

SEQ ID NO: 5490 - protein, 12 aa, Homo sapiens
  Table 3 sequence identifier: Q96KP4_C205
  MOD_RES (5)..(5): May or may not be conjugated to a chemical probe
KKKPCITYGLRG

SEQ ID NO: 5491 - protein, 16 aa, Homo sapiens
  Table 3 sequence identifier: P62136_C62
  MOD_RES (3)..(3): May or may not be conjugated to a chemical probe
KICGDIHGQYYDLLRL

SEQ ID NO: 5492 - protein, 15 aa, Homo sapiens
  Table 3 sequence identifier: P13984_C116
  MOD_RES (4)..(4): May or may not be conjugated to a chemical probe
RAECRPAASENYMRL

SEQ ID NO: 5493 - protein, 9 aa, Homo sapiens
  Table 3 sequence identifier: Q7L775_C337
  MOD_RES (2)..(2): May or may not be conjugated to a chemical probe
RCLNNWLRR

SEQ ID NO: 5494 - protein, 29 aa, Homo sapiens
  Table 3 sequence identifier: P55209_C258
  MOD_RES (23)..(23): May or may not be conjugated to a chemical probe
RSEPDDSDPFSFDGPEIMGCTGCQIDWKK

SEQ ID NO: 5495 - protein, 19 aa, Homo sapiens
  Table 3 sequence identifier: Q9NQR4_C146
  MOD_RES (17)..(17): May or may not be conjugated to a chemical probe
KTLSPGDSFSTFDTPYCRV

SEQ ID NO: 5496 - protein, 10 aa, Homo sapiens
  Table 3 sequence identifier: Q13459_C1279
  MOD_RES (5)..(5): May or may not be conjugated to a chemical probe
KSKPCGSPRV

SEQ ID NO: 5497 - protein, 20 aa, Homo sapiens
  Table 3 sequence identifier: Q9NVX0_C118
  MOD_RES (7)..(7): May or may not be conjugated to a chemical probe
RLLKPMCQENLPIEAVYHRY

SEQ ID NO: 5498 - protein, 17 aa, Homo sapiens
  Table 3 sequence identifier: Q969S9_C248
  MOD_RES (6)..(6): May or may not be conjugated to a chemical probe
KLLWNCNSNDGKDFERK

SEQ ID NO: 5499 - protein, 18 aa, Homo sapiens
  Table 3 sequence identifier: P14866_C260
  MOD_RES (13)..(13): May or may not be conjugated to a chemical probe
KASLNGADIYSGCCTLKI

SEQ ID NO: 5500 - protein, 10 aa, Homo sapiens
  Table 3 sequence identifier: Q13569_C233
  MOD_RES (2)..(2): May or may not be conjugated to a chemical probe
KCIYEIFSKE

SEQ ID NO: 5501 - protein, 27 aa, Homo sapiens
  Table 3 sequence identifier: O95239_C28
  MOD_RES (7)..(7): May or may not be conjugated to a chemical probe
KEISEGCQMCLSFVPGEPQVVVGTDKS

SEQ ID NO: 5502 - protein, 25 aa, Homo sapiens
  Table 3 sequence identifier: Q71RC2_C599
  MOD_RES (8)..(8): May or may not be conjugated to a chemical probe
RASTASPCNNNINAATAVALQEPRK

SEQ ID NO: 5503 - protein, 26 aa, Homo sapiens
  Table 3 sequence identifier: Q71RC2_C623
  MOD_RES (9)..(9): May or may not be conjugated to a chemical probe
RKLSYAEVCQKPPKEPSSVLVQPLRE

SEQ ID NO: 5504 - protein, 48 aa, Homo sapiens
  Table 3 sequence identifier: P29590_C80
  MOD_RES (13)..(13): May or may not be conjugated to a chemical probe
KLLPCLHTLCSGCLEASGMQCPICQAPWPLGADTPALDNVFFESLQRR

SEQ ID NO: 5505 - protein, 12 aa, Homo sapiens
  Table 3 sequence identifier: P29590_C151
  MOD_RES (2)..(2): May or may not be conjugated to a chemical probe
KCFEAHQWFLKH

SEQ ID NO: 5506 - protein, 15 aa, Homo sapiens
  Table 3 sequence identifier: P29590_C189
  MOD_RES (8)..(8): May or may not be conjugated to a chemical probe
RKTNNIFCSNPNHRT

SEQ ID NO: 5507 - protein, 12 aa, Homo sapiens
  Table 3 sequence identifier: P29590_C227
  MOD_RES (2)..(2): May or may not be conjugated to a chemical probe
KCDISAEIQQRQ

SEQ ID NO: 5508 - protein, 10 aa, Homo sapiens
  Table 3 sequence identifier: P29590_C479
  MOD_RES (2)..(2): May or may not be conjugated to a chemical probe
KCSQTQCPRK

SEQ ID NO: 5509 - protein, 38 aa, Homo sapiens
  Table 3 sequence identifier: Q09472_C1621
  MOD_RES (23)..(23): May or may not be conjugated to a chemical probe
RLIAGPAANSLPPIVDPDPLIPCDLMDGRDAFLTLARD

SEQ ID NO: 5510 - protein, 27 aa, Homo sapiens
  Table 3 sequence identifier: O15235_C93
  MOD_RES (5)..(5): May or may not be conjugated to a chemical probe
REAVCFIPGEGHTLQEHQIVLVEGGRT

SEQ ID NO: 5511 - protein, 8 aa, Homo sapiens
  Table 3 sequence identifier: P24534_C161
  MOD_RES (5)..(5): May or may not be conjugated to a chemical probe
KLEECVRS

SEQ ID NO: 5512 - protein, 10 aa, Homo sapiens
  Table 3 sequence identifier: P54819_C92
  MOD_RES (8)..(8): May or may not be conjugated to a chemical probe
KNLETPLCKN

SEQ ID NO: 5513 - protein, 21 aa, Homo sapiens
  Table 3 sequence identifier: Q9Y333_C26
  MOD_RES (7)..(7): May or may not be conjugated to a chemical probe
KNDLSICGTLHSVDQYLNIKL

SEQ ID NO: 5514 - protein, 37 aa, Homo sapiens
  Table 3 sequence identifier: Q9UER7_C427
  MOD_RES (31)..(31): May or may not be conjugated to a chemical probe
RLQGTSSHSADTPEASLDSGEGPSGMASQGCPSASRA

SEQ ID NO: 5515 - protein, 16 aa, Homo sapiens
  Table 3 sequence identifier: Q3KQU3_C373
  MOD_RES (11)..(11): May or may not be conjugated to a chemical probe
RSASASPLTPCSVTRS

SEQ ID NO: 5516 - protein, 33 aa, Homo sapiens
  Table 3 sequence identifier: Q8N0W3_C129
  MOD_RES (24)..(24): May or may not be conjugated to a chemical probe
RAFTCLPVENPEAPVEALVCNLDCLLDIMTYRL

SEQ ID NO: 5517 - protein, 24 aa, Homo sapiens
  Table 3 sequence identifier: Q16401_C361
  MOD_RES (2)..(2): May or may not be conjugated to a chemical probe
RCLDAISSLLYLPPEQQTDDLLRM

SEQ ID NO: 5518 - protein, 26 aa, Homo sapiens
  Table 3 sequence identifier: Q99590_C478
  MOD_RES (10)..(10): May or may not be conjugated to a chemical probe
RVGSSSSESCAQDLPVLVGEEGEVKK

SEQ ID NO: 5519 - protein, 16 aa, Homo sapiens
  Table 3 sequence identifier: Q9BYX2_C686
  MOD_RES (5)..(5): May or may not be conjugated to a chemical probe
KHFTCPTSSFPDKLRR

SEQ ID NO: 5520 - protein, 13 aa, Homo sapiens
  Table 3 sequence identifier: A2A288_C64
  MOD_RES (4)..(4): May or may not be conjugated to a chemical probe
RGSCGVPDSAQRG

SEQ ID NO: 5521 - protein, 22 aa, Homo sapiens
  Table 3 sequence identifier: Q9UBR2_C214
  MOD_RES (14)..(14): May or may not be conjugated to a chemical probe
KMMAEIYANGPISCGIMATERL

SEQ ID NO: 5522 - protein, 25 aa, Homo sapiens
  Table 3 sequence identifier: Q5U5Q3_C319
  MOD_RES (11)..(11): May or may not be conjugated to a chemical probe
KNGPALGGLSCSPNLPGQTTVQVRV

SEQ ID NO: 5523 - protein, 20 aa, Homo sapiens
  Table 3 sequence identifier: O95059_C31
  MOD_RES (9)..(9): May or may not be conjugated to a chemical probe
KVCLEFQDCGVGLNAAQFKQ

SEQ ID NO: 5524 - protein, 10 aa, Homo sapiens
  Table 3 sequence identifier: Q9NV56_C170
  MOD_RES (8)..(8): May or may not be conjugated to a chemical probe
KNSSDLGCKE

SEQ ID NO: 5525 - protein, 11 aa, Homo sapiens
  Table 3 sequence identifier: O14617_C574
  MOD_RES (4)..(4): May or may not be conjugated to a chemical probe
RASCILQLVKH

SEQ ID NO: 5526 - protein, 24 aa, Homo sapiens
  Table 3 sequence identifier: Q14980_C1937
  MOD_RES (3)..(3): May or may not be conjugated to a chemical probe
KTCYPLESRPSLSLGTITDEEMKT

SEQ ID NO: 5527 - protein, 21 aa, Homo sapiens
  Table 3 sequence identifier: Q9BYV9_C698
  MOD_RES (3)..(3): May or may not be conjugated to a chemical probe
KACMGELLDNFSCLSQEVCRD

SEQ ID NO: 5528 - protein, 29 aa, Homo sapiens
  Table 3 sequence identifier: P55072_C184
  MOD_RES (21)..(21): May or may not be conjugated to a chemical probe
KVVETDPSPYCIVAPDTVIHCEGEPIKRE

SEQ ID NO: 5529 - protein, 22 aa, Homo sapiens
  Table 3 sequence identifier: P55072_C209
  MOD_RES (19)..(19): May or may not be conjugated to a chemical probe
REDEEESLNEVGYDDIGGCRKQ

SEQ ID NO: 5530 - protein, 37 aa, Homo sapiens
  Table 3 sequence identifier: Q01433_C848
  MOD_RES (6)..(6): May or may not be conjugated to a chemical probe
RYETLCQELALITQAVQSEMLETIPEEAGITMSPGPQ

SEQ ID NO: 5531 - protein, 29 aa, Homo sapiens
  Table 3 sequence identifier: P55211_C172
  MOD_RES (27)..(27): May or may not be conjugated to a chemical probe
RGNADLAYILSMEPCGHCLIINNVNFCRE

SEQ ID NO: 5532 - protein, 16 aa, Homo sapiens
  Table 3 sequence identifier: Q08378_C455
  MOD_RES (8)..(8): May or may not be conjugated to a chemical probe
KLQAQVECSHSSQQRQ

SEQ ID NO: 5533 - protein, 22 aa, Homo sapiens
  Table 3 sequence identifier: Q12912_C264
  MOD_RES (10)..(10): May or may not be conjugated to a chemical probe
KLLESLTPLCEDDNQAQEIIKK

SEQ ID NO: 5534 - protein, 29 aa, Homo sapiens
  Table 3 sequence identifier: Q07021_C186
  MOD_RES (7)..(7): May or may not be conjugated to a chemical probe
KALVLDCHYPEDEVGQEDEAESDIFSIRE

SEQ ID NO: 5535 - protein, 49 aa, Homo sapiens
  Table 3 sequence identifier: Q9NSE4_C414
  MOD_RES (29)..(29): May or may not be conjugated to a chemical probe
KGTGLVHTAPAHGMEDYGVASQHNLPMDCLVDEDGVFTDVAGPELQNKA

SEQ ID NO: 5536 - protein, 17 aa, Homo sapiens
  Table 3 sequence identifier: Q9NSE4_C883
  MOD_RES (13)..(13): May or may not be conjugated to a chemical probe
KKPGLEEAVESACAMRD

SEQ ID NO: 5537 - protein, 13 aa, Homo sapiens
  Table 3 sequence identifier: P14854_C30
  MOD_RES (3)..(3): May or may not be conjugated to a chemical probe
RNCWQNYLDFHRC

SEQ ID NO: 5538 - protein, 23 aa, Homo sapiens
  Table 3 sequence identifier: Q96ER3_C430
  MOD_RES (2)..(2): May or may not be conjugated to a chemical probe
KCSSAFQNLLPFYSPVVEDFIKI

SEQ ID NO: 5539 - protein, 23 aa, Homo sapiens
  Table 3 sequence identifier: P08238_C592
  MOD_RES (7)..(8): May or may not be conjugated to a chemical probe
RLVSSPCCIVTSTYGWTANMERI

SEQ ID NO: 5540 - protein, 22 aa, Homo sapiens
  Table 3 sequence identifier: Q8IZ69_C551
  MOD_RES (20)..(20): May or may not be conjugated to a chemical probe
RLLYVSCNPRAAMGNFVDLCRA

SEQ ID NO: 5541 - protein, 15 aa, Homo sapiens
  Table 3 sequence identifier: Q8NFX7_C120
  MOD_RES (2)..(2): May or may not be conjugated to a chemical probe
KCTFFQILHHTCQRY

SEQ ID NO: 5542 - protein, 19 aa, Homo sapiens
  Table 3 sequence identifier: Q15118_C223
  MOD_RES (11)..(11): May or may not be conjugated to a chemical probe
RKHIGSINPNCNVLEVIKD

SEQ ID NO: 5543 - protein, 17 aa, Homo sapiens
  Table 3 sequence identifier: Q9P2J5_C1052
  MOD_RES (6)..(6): May or may not be conjugated to a chemical probe
KIREDCCPGKPLNVFRI

SEQ ID NO: 5544 - protein, 25 aa, Homo sapiens
  Table 3 sequence identifier: Q9P2J5_C1053
  MOD_RES (15)..(15): May or may not be conjugated to a chemical probe
KFASEAEDKIREDCCPGKPLNVFRI

SEQ ID NO: 5545 - protein, 21 aa, Homo sapiens
  Table 3 sequence identifier: Q8TF72_C1331
  MOD_RES (4)..(4): May or may not be conjugated to a chemical probe
RTPCPRPPLAGTQGLVTDTRA

SEQ ID NO: 5546 - protein, 30 aa, Homo sapiens
  Table 3 sequence identifier: Q01415_C407
  MOD_RES (10)..(10): May or may not be conjugated to a chemical probe
RLTGAGWGGCTVSMVPADKLPSFLANVHKA

SEQ ID NO: 5547 - protein, 42 aa, Homo sapiens
  Table 3 sequence identifier: Q8IYL3_C124
  MOD_RES (40)..(40): May or may not be conjugated to a chemical probe
KVTPETPCENEFAEGSALLPGSEAGVSVQQGAASLPLGGCRV

SEQ ID NO: 5548 - protein, 19 aa, Homo sapiens
  Table 3 sequence identifier: O43143_C644
  MOD_RES (10)..(10): May or may not be conjugated to a chemical probe
KQNHESVQWCYDNFINYRS

SEQ ID NO: 5549 - protein, 8 aa, Homo sapiens
  Table 3 sequence identifier: Q99615_C247
  MOD_RES (3)..(3): May or may not be conjugated to a chemical probe
KACIACRN

SEQ ID NO: 5550 - protein, 21 aa, Homo sapiens
  Table 3 sequence identifier: Q05086_C843
  MOD_RES (8)..(8): May or may not be conjugated to a chemical probe
RLPTSHTCFNVLLLPEYSSKE

SEQ ID NO: 5551 - protein, 10 aa, Homo sapiens
  Table 3 sequence identifier: P53667_C349
  MOD_RES (3)..(3): May or may not be conjugated to a chemical probe
KGCFGQAIKV

SEQ ID NO: 5552 - protein, 24 aa, Homo sapiens
  Table 3 sequence identifier: Q8IWV8_C1619
  MOD_RES (21)..(21): May or may not be conjugated to a chemical probe
KLINLPEDYSSLINQASNFSCPKS

SEQ ID NO: 5553 - protein, 16 aa, Homo sapiens
  Table 3 sequence identifier: Q96T51_C81
  MOD_RES (10)..(10): May or may not be conjugated to a chemical probe
RATGNLSASCGSALRA

SEQ ID NO: 5554 - protein, 35 aa, Homo sapiens
  Table 3 sequence identifier: P13797_C209
  MOD_RES (23)..(23): May or may not be conjugated to a chemical probe
KLTPFIIQENLNLALNSASAIGCHVVNIGAEDLRA

SEQ ID NO: 5555 - protein, 24 aa, Homo sapiens
  Table 3 sequence identifier: P39880_C802
  MOD_RES (17)..(17): May or may not be conjugated to a chemical probe
KEAQDAPGLDPQGAADCAQGVLRQ

SEQ ID NO: 5556 - protein, 27 aa, Homo sapiens
  Table 3 sequence identifier: Q53EL6_C288
  MOD_RES (22)..(22): May or may not be conjugated to a chemical probe
RAVGDGILCNTYIDSYKGTVDCVQARA

SEQ ID NO: 5557 - protein, 29 aa, Homo sapiens
  Table 3 sequence identifier: P12277_C283
  MOD_RES (19)..(19): May or may not be conjugated to a chemical probe
KSKDYEFMWNPHLGYILTCPSNLGTGLRA

SEQ ID NO: 5558 - protein, 13 aa, Homo sapiens
  Table 3 sequence identifier: Q13617_C385
  MOD_RES (4)..(4): May or may not be conjugated to a chemical probe
KSVCKAPELLAKY

SEQ ID NO: 5559 - protein, 20 aa, Homo sapiens
  Table 3 sequence identifier: Q8WXE1_C238
  MOD_RES (13)..(13): May or may not be conjugated to a chemical probe
RKNPSVVIKPEACSPQFGKT

SEQ ID NO: 5560 - protein, 27 aa, Homo sapiens
  Table 3 sequence identifier: Q8WXE1_C263
  MOD_RES (14)..(14): May or may not be conjugated to a chemical probe
KESFSANMSLPHPCQTESGYKPLVGRE

SEQ ID NO: 5561 - protein, 37 aa, Homo sapiens
  Table 3 sequence identifier: Q7Z4Q2_C20
  MOD_RES (10)..(10): May or may not be conjugated to a chemical probe
RPQFSPTGDCQAEAAAAANGTGGEEDDGPAAELLEKL

SEQ ID NO: 5562 - protein, 21 aa, Homo sapiens
  Table 3 sequence identifier: Q15052_C564
  MOD_RES (7)..(7): May or may not be conjugated to a chemical probe
KTSSSSCSAHSSFSSTGQPRG

SEQ ID NO: 5563 - protein, 20 aa, Homo sapiens
  Table 3 sequence identifier: P49902_C181
  MOD_RES (5)..(5): May or may not be conjugated to a chemical probe
RYTSCETGFKDGDLFMSYRS

SEQ ID NO: 5564 - protein, 32 aa, Homo sapiens
  Table 3 sequence identifier: P49903_C119
  MOD_RES (19)..(19): May or may not be conjugated to a chemical probe
RIACANVLSDLYAMGVTECDNMLMLLGVSNKM

SEQ ID NO: 5565 - protein, 12 aa, Homo sapiens
  Table 3 sequence identifier: Q53EP0_C442
  MOD_RES (3)..(3): May or may not be conjugated to a chemical probe
KLCPAMGYTFRL

SEQ ID NO: 5566 - protein, 11 aa, Homo sapiens
  Table 3 sequence identifier: Q92905_C218
  MOD_RES (9)..(9): May or may not be conjugated to a chemical probe
KIEDFGVHCKQ

SEQ ID NO: 5567 - protein, 13 aa, Homo sapiens
  Table 3 sequence identifier: Q15121_C27
  MOD_RES (4)..(4): May or may not be conjugated to a chemical probe
KSACKEDIPSEKS

SEQ ID NO: 5568 - protein, 25 aa, Homo sapiens
  Table 3 sequence identifier: Q9Y315_C118
  MOD_RES (5)..(5): May or may not be conjugated to a chemical probe
KAAGCNIPVASVAAGFPAGQTHLKT

SEQ ID NO: 5569 - protein, 26 aa, Homo sapiens
  Table 3 sequence identifier: O75909_C23
  MOD_RES (19)..(19): May or may not be conjugated to a chemical probe
KENSSPSVTSANLDHTKPCWYWDKKD

SEQ ID NO: 5570 - protein, 13 aa, Homo sapiens
  Table 3 sequence identifier: Q14232_C218
  MOD_RES (10)..(10): May or may not be conjugated to a chemical probe
KIGTNQMAVCAKA

SEQ ID NO: 5571 - protein, 10 aa, Homo sapiens
  Table 3 sequence identifier: P53582_C22
  MOD_RES (4)..(4): May or may not be conjugated to a chemical probe
KLQCPTCIKL

SEQ ID NO: 5572 - protein, 11 aa, Homo sapiens
  Table 3 sequence identifier: Q8WZ42_C5248
  MOD_RES (9)..(9): May or may not be conjugated to a chemical probe
KGDATQLACKV

SEQ ID NO: 5573 - protein, 20 aa, Homo sapiens
  Table 3 sequence identifier: Q6UB35_C828
  MOD_RES (11)..(11): May or may not be conjugated to a chemical probe
KRAGAFDAVPCYHWSVGGKG

SEQ ID NO: 5574 - protein, 17 aa, Homo sapiens
  Table 3 sequence identifier: O43516_C446
  MOD_RES (9)..(9): May or may not be conjugated to a chemical probe
RNGFQDSPCEDEWESRF

SEQ ID NO: 5575 - protein, 17 aa, Homo sapiens
  Table 3 sequence identifier: Q9UHB4_C486
  MOD_RES (15)..(15): May or may not be conjugated to a chemical probe
RVAQGQTGNFLFFGCRW

SEQ ID NO: 5576 - protein, 18 aa, Homo sapiens
  Table 3 sequence identifier: P41252_C400
  MOD_RES (15)..(15): May or may not be conjugated to a chemical probe
RLLVATTFTHSYPFCWRS

SEQ ID NO: 5577 - protein, 17 aa, Homo sapiens
  Table 3 sequence identifier: Q9UHB6_C164
  MOD_RES (6)..(6): May or may not be conjugated to a chemical probe
KKMENCLGESRHEVEKS

SEQ ID NO: 5578 - protein, 9 aa, Homo sapiens
  Table 3 sequence identifier: Q14141_C14
  MOD_RES (7)..(7): May or may not be conjugated to a chemical probe
RQVGEGCRT

SEQ ID NO: 5579 - protein, 10 aa, Homo sapiens
  Table 3 sequence identifier: Q14149_C307
  MOD_RES (8)..(8): May or may not be conjugated to a chemical probe
RITFGFNCRN

SEQ ID NO: 5580 - protein, 37 aa, Homo sapiens
  Table 3 sequence identifier: O75122_C528
  MOD_RES (34)..(34): May or may not be conjugated to a chemical probe
KIPRSQGCSREASPSRLSVARSSRIPRPSVSQGCSRE

SEQ ID NO: 5581 - protein, 37 aa, Homo sapiens
  Table 3 sequence identifier: P46821_C905
  MOD_RES (24)..(24): May or may not be conjugated to a chemical probe
REVTKGPAESPDEGITTTEGEGECEQTPEELEPVEKQ

SEQ ID NO: 5582 - protein, 25 aa, Homo sapiens
  Table 3 sequence identifier: P46821_C963
  MOD_RES (19)..(19): May or may not be conjugated to a chemical probe
KAETEEAEEPEEDGEEHVCVSASKH

SEQ ID NO: 5583 - protein, 8 aa, Homo sapiens
  Table 3 sequence identifier: O60343_C295
  MOD_RES (3)..(3): May or may not be conjugated to a chemical probe
RVCFPERI

SEQ ID NO: 5584 - protein, 25 aa, Homo sapiens
  Table 3 sequence identifier: Q96C36_C232
  MOD_RES (5)..(5): May or may not be conjugated to a chemical probe
KDNVCSPGGATIHALHFLESGGFRS

SEQ ID NO: 5585 - protein, 42 aa, Homo sapiens
  Table 3 sequence identifier: P61011_C229
  MOD_RES (36)..(36): May or may not be conjugated to a chemical probe
RHKQEDSLFEEMLQVANAIQPDNIVYVMDASIGQACEAQAKA

SEQ ID NO: 5586 - protein, 14 aa, Homo sapiens
  Table 3 sequence identifier: Q9H223_C141
  MOD_RES (4)..(4): May or may not be conjugated to a chemical probe
RFMCSQLPNQVLKS

SEQ ID NO: 5587 - protein, 24 aa, Homo sapiens
  Table 3 sequence identifier: O14981_C1542
  MOD_RES (4)..(4): May or may not be conjugated to a chemical probe
RAKCDVDETVSSATLSEETEKPKL

SEQ ID NO: 5588 - protein, 15 aa, Homo sapiens
  Table 3 sequence identifier: P13796_C283
  MOD_RES (12)..(12): May or may not be conjugated to a chemical probe
RWANYHLENAGCNKI

SEQ ID NO: 5589 - protein, 30 aa, Homo sapiens
  Table 3 sequence identifier: O95071_C691
  MOD_RES (11)..(11): May or may not be conjugated to a chemical probe
KFPGTSSNTNCQNSSGPDADPSSLLQDCRL

SEQ ID NO: 5590 - protein, 47 aa, Homo sapiens
  Table 3 sequence identifier: O95071_C2768
  MOD_RES (43)..(43): May or may not be conjugated to a chemical probe
RQDLVYFWTSSPSLPASEEGFQPMPSITIRPPDDQHLPTANTCISRL

SEQ ID NO: 5591 - protein, 24 aa, Homo sapiens
  Table 3 sequence identifier: Q9Y2L1_C476
  MOD_RES (6)..(6): May or may not be conjugated to a chemical probe
RHLCICSVDPPGCTDIDDALHCRE

SEQ ID NO: 5592 - protein, 17 aa, Homo sapiens
  Table 3 sequence identifier: A0FGR8_C181
  MOD_RES (3)..(3): May or may not be conjugated to a chemical probe
RACDLPAWVHFPDTERA

SEQ ID NO: 5593 - protein, 47 aa, Homo sapiens
  Table 3 sequence identifier: P09960_C275
  MOD_RES (33)..(33): May or may not be conjugated to a chemical probe
KIAEDLGGPYVWGQYDLLVLPPSFPYGGMENPCLTFVTPTLLAGDKS

SEQ ID NO: 5594 - protein, 34 aa, Homo sapiens
  Table 3 sequence identifier: Q06330_C454
  MOD_RES (25)..(25): May or may not be conjugated to a chemical probe
RNDGIIYSTSLTFTYTPEPGPRPHCSAAGAILRA

SEQ ID NO: 5595 - protein, 10 aa, Homo sapiens
  Table 3 sequence identifier: O14519_C105
  MOD_RES (3)..(3): May or may not be conjugated to a chemical probe
RECLAETERN

SEQ ID NO: 5596 - protein, 14 aa, Homo sapiens
  Table 3 sequence identifier: Q15545_C72
  MOD_RES (7)..(7): May or may not be conjugated to a chemical probe
KLVDLPCVMESLKT

SEQ ID NO: 5597 - protein, 32 aa, Homo sapiens
  Table 3 sequence identifier: Q15545_C92
  MOD_RES (6)..(6): May or may not be conjugated to a chemical probe
KTADICQMLVSTVDGDLYPPVEEPVASTDPKA

SEQ ID NO: 5598 - protein, 36 aa, Homo sapiens
  Table 3 sequence identifier: Q15543_C38
  MOD_RES (2)..(2): May or may not be conjugated to a chemical probe
RCMMYGFGDDQNPYTESVDILEDLVIEFITEMTHKA

SEQ ID NO: 5599 - protein, 9 aa, Homo sapiens
  Table 3 sequence identifier: Q6P587_C22
  MOD_RES (5)..(5): May or may not be conjugated to a chemical probe
KNIVCVGRN

SEQ ID NO: 5600 - protein, 30 aa, Homo sapiens
  Table 3 sequence identifier: P51649_C93
  MOD_RES (26)..(26): May or may not be conjugated to a chemical probe
RWLPAAATFPVQDPASGAALGMVADCGVRE

SEQ ID NO: 5601 - protein, 20 aa, Homo sapiens
  Table 3 sequence identifier: Q15048_C15
  MOD_RES (6)..(6): May or may not be conjugated to a chemical probe
RQVLQCQPAACQALPLLPRE

SEQ ID NO: 5602 - protein, 8 aa, Homo sapiens
  Table 3 sequence identifier: Q15042_C117
  MOD_RES (4)..(4): May or may not be conjugated to a chemical probe
RAHCLVRW

SEQ ID NO: 5603 - protein, 20 aa, Homo sapiens
  Table 3 sequence identifier: Q15042_C873
  MOD_RES (5)..(5): May or may not be conjugated to a chemical probe
RFVSCLLEQPEVLVTGAGRG

SEQ ID NO: 5604 - protein, 12 aa, Homo sapiens
  Table 3 sequence identifier: Q6R327_C1631
  MOD_RES (2)..(2): May or may not be conjugated to a chemical probe
KCHETGLLTIKE

SEQ ID NO: 5605 - protein, 26 aa, Homo sapiens
  Table 3 sequence identifier: P49915_C530
  MOD_RES (7)..(7): May or may not be conjugated to a chemical probe
RSYSYVCGISSKDEPDWESLIFLARL

SEQ ID NO: 5606 - protein, 11 aa, Homo sapiens
  Table 3 sequence identifier: Q9Y2K7_C840
  MOD_RES (7)..(7): May or may not be conjugated to a chemical probe
RVLVQHCPART

SEQ ID NO: 5607 - protein, 19 aa, Homo sapiens
  Table 3 sequence identifier: P00973_C25
  MOD_RES (16)..(16): May or may not be conjugated to a chemical probe
KSLDKFIEDYLLPDTCFRM

SEQ ID NO: 5608 - protein, 30 aa, Homo sapiens
  Table 3 sequence identifier: Q01780_C651
  MOD_RES (10)..(10): May or may not be conjugated to a chemical probe
KEDNLLGTTCLIATAVITLFNEPSAEDSKK

SEQ ID NO: 5609 - protein, 21 aa, Homo sapiens
  Table 3 sequence identifier: P12268_C468
  MOD_RES (14)..(14): May or may not be conjugated to a chemical probe
KFVPYLIAGIQHSCQDIGAKS

SEQ ID NO: 5610 - protein, 35 aa, Homo sapiens
  Table 3 sequence identifier: P07437_C129
  MOD_RES (9)..(9): May or may not be conjugated to a chemical probe
RKEAESCDCLQGFQLTHSLGGGTGSGMGTLLISKI

SEQ ID NO: 5611 - protein, 34 aa, Homo sapiens
  Table 3 sequence identifier: Q01658_C94
  MOD_RES (32)..(32): May or may not be conjugated to a chemical probe
KKTISPEHVIQALESLGFGSYISEVKEVLQECKT

SEQ ID NO: 5612 - protein, 17 aa, Homo sapiens
  Table 3 sequence identifier: Q9Y490_C29
  MOD_RES (15)..(15): May or may not be conjugated to a chemical probe
KTMQFEPSTMVYDACRI

SEQ ID NO: 5613 - protein, 33 aa, Homo sapiens
  Table 3 sequence identifier: Q9Y490_C1478
  MOD_RES (10)..(10): May or may not be conjugated to a chemical probe
RANQAIQMACQSLGEPGCTQAQVLSAATIVAKH

SEQ ID NO: 5614 - protein, 14 aa, Homo sapiens
  Table 3 sequence identifier: P43243_C821
  MOD_RES (5)..(5): May or may not be conjugated to a chemical probe
KNTHCSSLPHYQKL

SEQ ID NO: 5615 - protein, 13 aa, Homo sapiens
  Table 3 sequence identifier: Q86W50_C253
  MOD_RES (2)..(2): May or may not be conjugated to a chemical probe
KCSLAPLKEELRI

SEQ ID NO: 5616 - protein, 27 aa, Homo sapiens
  Table 3 sequence identifier: P49005_C447
  MOD_RES (5)..(5): May or may not be conjugated to a chemical probe
RSLACQPISFSGFGAEDDDLGGLGLGP

SEQ ID NO: 5617 - protein, 19 aa, Homo sapiens
  Table 3 sequence identifier: Q9H3H3_C199
  MOD_RES (2)..(2): May or may not be conjugated to a chemical probe
KCLLTYKPDVYTYLGIYRA

SEQ ID NO: 5618 - protein, 27 aa, Homo sapiens
  Table 3 sequence identifier: P27708_C484
  MOD_RES (20)..(20): May or may not be conjugated to a chemical probe
RNERPDGVLLTFGGQTALNCGVELTKA

SEQ ID NO: 5619 - protein, 15 aa, Homo sapiens
  Table 3 sequence identifier: Q709C8_C1481
  MOD_RES (7)..(7): May or may not be conjugated to a chemical probe
KKISMQCFDFTDSKG

SEQ ID NO: 5620 - protein, 40 aa, Homo sapiens
  Table 3 sequence identifier: P23497_C373
  MOD_RES (25)..(25): May or may not be conjugated to a chemical probe
RSEPVINNDNPLESNDEKEGQEATCSRPQIVPEPMDFRKL

SEQ ID NO: 5621 - protein, 28 aa, Homo sapiens
  Table 3 sequence identifier: Q9NXV2_C25
  MOD_RES (25)..(25): May or may not be conjugated to a chemical probe
MAENHCELLSPARGGIGAGLGGGLCRRC

SEQ ID NO: 5622 - protein, 11 aa, Homo sapiens
  Table 3 sequence identifier: Q05209_C470
  MOD_RES (6)..(6): May or may not be conjugated to a chemical probe
KSASPCIADKI

SEQ ID NO: 5623 - protein, 12 aa, Homo sapiens
  Table 3 sequence identifier: Q9P258_C305
  MOD_RES (6)..(6): May or may not be conjugated to a chemical probe
RIEYDCELVPRR

SEQ ID NO: 5624 - protein, 20 aa, Homo sapiens
  Table 3 sequence identifier: Q8N3R9_C490
  MOD_RES (13)..(13): May or may not be conjugated to a chemical probe
RKRPIILIGPQNCGQNELRQ

SEQ ID NO: 5625 - protein, 28 aa, Homo sapiens
  Table 3 sequence identifier: Q13464_C29
  MOD_RES (8)..(8): May or may not be conjugated to a chemical probe
KSEVNSDCLLDGLDALVYDLDFPALRKN

SEQ ID NO: 5626 - protein, 10 aa, Homo sapiens
  Table 3 sequence identifier: Q7L5Y9_C195
  MOD_RES (3)..(3): May or may not be conjugated to a chemical probe
KSCLEFSLRI

SEQ ID NO: 5627 - protein, 16 aa, Homo sapiens
  Table 3 sequence identifier: O15446_C150
  MOD_RES (3)..(3): May or may not be conjugated to a chemical probe
RFCAFGGNPPVTGPRS

SEQ ID NO: 5628 - protein, 22 aa, Homo sapiens
  Table 3 sequence identifier: P54136_C36
  MOD_RES (3)..(3): May or may not be conjugated to a chemical probe
  MOD_RES (5)..(5): May or may not be conjugated to a chemical probe
KNCGCLGASPNLEQLQEENLKL

SEQ ID NO: 5629 - protein, 15 aa, Homo sapiens
  Table 3 sequence identifier: P54136_C638
  MOD_RES (5)..(5): May or may not be conjugated to a chemical probe
RMLLCEAVAAVMAKG

SEQ ID NO: 5630 - protein, 13 aa, Homo sapiens
  Table 3 sequence identifier: Q96F24_C155
  MOD_RES (8)..(8): May or may not be conjugated to a chemical probe
KSEPAEPCIGSKA

SEQ ID NO: 5631 - protein, 12 aa, Homo sapiens
  Table 3 sequence identifier: Q9Y5L0_C527
  MOD_RES (7)..(7): May or may not be conjugated to a chemical probe
KAIHNICSVCRD

SEQ ID NO: 5632 - protein, 24 aa, Homo sapiens
  Table 3 sequence identifier: Q86YV5_C444
  MOD_RES (15)..(15): May or may not be conjugated to a chemical probe
KIEHAAAAQGQGQVCTGNAWAQKA

SEQ ID NO: 5633 - protein, 11 aa, Homo sapiens
  Table 3 sequence identifier: O60502_C663
  MOD_RES (9)..(9): May or may not be conjugated to a chemical probe
KSFVQWLGCRS

SEQ ID NO: 5634 - protein, 10 aa, Homo sapiens
  Table 3 sequence identifier: O60502_C896
  MOD_RES (4)..(4): May or may not be conjugated to a chemical probe
KLGCFEIAKM

SEQ ID NO: 5635 - protein, 31 aa, Homo sapiens
  Table 3 sequence identifier: Q13671_C223
  MOD_RES (15)..(15): May or may not be conjugated to a chemical probe
RSPQELDQGTGAALCFFNPLFPGDLGPTKRE

SEQ ID NO: 5636 - protein, 29 aa, Homo sapiens
  Table 3 sequence identifier: O95067_C131
  MOD_RES (16)..(16): May or may not be conjugated to a chemical probe
KIEDIDNEDWENPQLCSDYVKDIYQYLRQ

SEQ ID NO: 5637 - protein, 17 aa, Homo sapiens
  Table 3 sequence identifier: P38646_C608
  MOD_RES (14)..(14): May or may not be conjugated to a chemical probe
KMEEFKDQLPADECNKL

SEQ ID NO: 5638 - protein, 14 aa, Homo sapiens
  Table 3 sequence identifier: Q96MX6_C70
  MOD_RES (2)..(2): May or may not be conjugated to a chemical probe
KCGTFGATSLQQRY

SEQ ID NO: 5639 - protein, 16 aa, Homo sapiens
  Table 3 sequence identifier: P49588_C901
  MOD_RES (4)..(4): May or may not be conjugated to a chemical probe
KITCLCQVPQNAANRG

SEQ ID NO: 5640 - protein, 13 aa, Homo sapiens
  Table 3 sequence identifier: Q9HCC0_C391
  MOD_RES (9)..(9): May or may not be conjugated to a chemical probe
KGTHFVQLCCQRN

SEQ ID NO: 5641 - protein, 22 aa, Homo sapiens
  Table 3 sequence identifier: P47755_C157
  MOD_RES (12)..(12): May or may not be conjugated to a chemical probe
KKIDGQQTIIACIESHQFQAKN

SEQ ID NO: 5642 - protein, 27 aa, Homo sapiens
  Table 3 sequence identifier: Q8TDD1_C73
  MOD_RES (17)..(17): May or may not be conjugated to a chemical probe
RKLGPGRPLPTFPTSECTSDVEPDTRE

SEQ ID NO: 5643 - protein, 39 aa, Homo sapiens
  Table 3 sequence identifier: P47897_C111
  MOD_RES (17)..(17): May or may not be conjugated to a chemical probe
RSHPLDPIDTVDFERECGVGVIVTPEQIEEAVEAAINRH

SEQ ID NO: 5644 - protein, 32 aa, Homo sapiens
  Table 3 sequence identifier: P06730_C89
  MOD_RES (25)..(25): May or may not be conjugated to a chemical probe
KFDTVEDFWALYNHIQLSSNLMPGCDYSLFKD

SEQ ID NO: 5645 - protein, 36 aa, Homo sapiens
  Table 3 sequence identifier: P06730_C136
  MOD_RES (14)..(14): May or may not be conjugated to a chemical probe
RSDLDRFWLETLLCLIGESFDDYSDDVCGAVVNVRA

SEQ ID NO: 5646 - protein, 14 aa, Homo sapiens
  Table 3 sequence identifier: Q7Z4W1_C150
  MOD_RES (10)..(10): May or may not be conjugated to a chemical probe
RAVTNHSVYCSTKG

SEQ ID NO: 5647 - protein, 17 aa, Homo sapiens
  Table 3 sequence identifier: Q96QB1_C532
  MOD_RES (11)..(11): May or may not be conjugated to a chemical probe
RSDDSDEDEPCAISGKW

SEQ ID NO: 5648 - protein, 44 aa, Homo sapiens
  Table 3 sequence identifier: P30740_C344
  MOD_RES (24)..(24): May or may not be conjugated to a chemical probe
KSFVEVNEEGTEAAAATAGIATFCMLMPEENFTADHPFLFFIRH

SEQ ID NO: 5649 - protein, 22 aa, Homo sapiens
  Table 3 sequence identifier: O95758_C68
  MOD_RES (5)..(5): May or may not be conjugated to a chemical probe
RKIPCDVTEAEIISLGLPFGKV

SEQ ID NO: 5650 - protein, 15 aa, Homo sapiens
  Table 3 sequence identifier: P00966_C132
  MOD_RES (6)..(6): May or may not be conjugated to a chemical probe
RFELSCYSLAPQIKV

SEQ ID NO: 5651 - protein, 32 aa, Homo sapiens
  Table 3 sequence identifier: P62917_C115
  MOD_RES (23)..(23): May or may not be conjugated to a chemical probe
KAQLNIGNVLPVGTMPEGTIVCCLEEKPGDRG

SEQ ID NO: 5652 - protein, 9 aa, Homo sapiens
  Table 3 sequence identifier: Q00796_C106
  MOD_RES (7)..(7): May or may not be conjugated to a chemical probe
RENDEFCKM

SEQ ID NO: 5653 - protein, 11 aa, Homo sapiens
  Table 3 sequence identifier: O75928_C346
  MOD_RES (6)..(6): May or may not be conjugated to a chemical probe
RVSLMCPLGKM

SEQ ID NO: 5654 - protein, 27 aa, Homo sapiens
  Table 3 sequence identifier: Q8TF42_C367
  MOD_RES (19)..(19): May or may not be conjugated to a chemical probe
RRPYEDQGLGETTPLTIICQPMQPLRV

SEQ ID NO: 5655 - protein, 12 aa, Homo sapiens
  Table 3 sequence identifier: Q9NVR7_C298
  MOD_RES (4)..(4): May or may not be conjugated to a chemical probe
KIACNTHVAPRM

SEQ ID NO: 5656 - protein, 21 aa, Homo sapiens
  Table 3 sequence identifier: Q9UK39_C302
  MOD_RES (6)..(6): May or may not be conjugated to a chemical probe
RSAQGCDLLQNLQNITQGAKI

SEQ ID NO: 5657 - protein, 41 aa, Homo sapiens
  Table 3 sequence identifier: Q99627_C20
  MOD_RES (6)..(6): May or may not be conjugated to a chemical probe
KLLDQCENQELEAPGGIATPPVYGQLLALYLLHNDMNNARY

SEQ ID NO: 5658 - protein, 9 aa, Homo sapiens
  Table 3 sequence identifier: Q9C0J8_C120
  MOD_RES (2)..(2): May or may not be conjugated to a chemical probe
KCPVFVVRW

SEQ ID NO: 5659 - protein, 23 aa, Homo sapiens
  Table 3 sequence identifier: Q6ZUJ8_C358
  MOD_RES (10)..(10): May or may not be conjugated to a chemical probe
KNLTALLLTCPGALQAYSVANKH

SEQ ID NO: 5660 - protein, 34 aa, Homo sapiens
  Table 3 sequence identifier: P23246_C431
  MOD_RES (2)..(2): May or may not be conjugated to a chemical probe
RCSEGVFLLTTTPRPVIVEPLEQLDDEDGLPEKL

SEQ ID NO: 5661 - protein, 13 aa, Homo sapiens
  Table 3 sequence identifier: P48506_C501
  MOD_RES (10)..(10): May or may not be conjugated to a chemical probe
KGGNAVVDGCGKA

SEQ ID NO: 5662 - protein, 22 aa, Homo sapiens
  Table 3 sequence identifier: Q04637_C821
  MOD_RES (2)..(2): May or may not be conjugated to a chemical probe
RCLMALKVPTTEKPTVTVNFRK

SEQ ID NO: 5663 - protein, 24 aa, Homo sapiens
  Table 3 sequence identifier: P52701_C108
  MOD_RES (10)..(10): May or may not be conjugated to a chemical probe
KMEGYPWWPCLVYNHPFDGTFIRE

SEQ ID NO: 5664 - protein, 27 aa, Homo sapiens
  Table 3 sequence identifier: P11310_C156
  MOD_RES (9)..(9): May or may not be conjugated to a chemical probe
RMTEEPLMCAYCVTEPGAGSDVAGIKT

SEQ ID NO: 5665 - protein, 17 aa, Homo sapiens
  Table 3 sequence identifier: Q96G03_C86
  MOD_RES (15)..(15): May or may not be conjugated to a chemical probe
RMNDLTIIQTTQGFCRY

SEQ ID NO: 5666 - protein, 24 aa, Homo sapiens
  Table 3 sequence identifier: Q9NZ32_C352
  MOD_RES (4)..(4): May or may not be conjugated to a chemical probe
KANCVAWLGGAIFGALQDILGSRS

SEQ ID NO: 5667 - protein, 26 aa, Homo sapiens
  Table 3 sequence identifier: P32119_C70
  MOD_RES (4)..(4): May or may not be conjugated to a chemical probe
KLGCEVLGVSVDSQFTHLAWINTPRK

SEQ ID NO: 5668 - protein, 22 aa, Homo sapiens
  Table 3 sequence identifier: Q5R3I4_C128
  MOD_RES (3)..(3): May or may not be conjugated to a chemical probe
KACELWEQILQDHPTDMLALKF

SEQ ID NO: 5669 - protein, 42 aa, Homo sapiens
  Table 3 sequence identifier: O43318_C513
  MOD_RES (37)..(37): May or may not be conjugated to a chemical probe
RSHPWTPDDSTDTNGSDNSIPMAYLTLDHQLQPLAPCPNSKE

SEQ ID NO: 5670 - protein, 26 aa, Homo sapiens
  Table 3 sequence identifier: Q53H82_C21
  MOD_RES (5)..(5): May or may not be conjugated to a chemical probe
RVLGCNPGPMTLQGTNTYLVGTGPRR

SEQ ID NO: 5671 - protein, 10 aa, Homo sapiens
  Table 3 sequence identifier: P63165_C52
  MOD_RES (7)..(7): May or may not be conjugated to a chemical probe
KLKESYCQRQ

SEQ ID NO: 5672 - protein, 37 aa, Homo sapiens
  Table 3 sequence identifier: P33993_C566
  MOD_RES (35)..(35): May or may not be conjugated to a chemical probe
RLAQHITYVHQHSRQPPSQFEPLDMKLMRRYIAMCRE

SEQ ID NO: 5673 - protein, 15 aa, Homo sapiens
  Table 3 sequence identifier: P41567_C94
  MOD_RES (4)..(4): May or may not be conjugated to a chemical probe
KNICQFLVEIGLAKD

SEQ ID NO: 5674 - protein, 20 aa, Homo sapiens
  Table 3 sequence identifier: P22830_C395
  MOD_RES (17)..(17): May or may not be conjugated to a chemical probe
KALADLVHSHIQSNELCSKQ

SEQ ID NO: 5675 - protein, 22 aa, Homo sapiens
  Table 3 sequence identifier: P36871_C160
  MOD_RES (9)..(9): May or may not be conjugated to a chemical probe
KTIEEYAVCPDLKVDLGVLGKQ

SEQ ID NO: 5676 - protein, 23 aa, Homo sapiens
  Table 3 sequence identifier: Q9H0D6_C29
  MOD_RES (18)..(18): May or may not be conjugated to a chemical probe
RKYPSIIVNCVEEKPKECNGVKI

SEQ ID NO: 5677 - protein, 21 aa, Homo sapiens
  Table 3 sequence identifier: P31751_C124
  MOD_RES (2)..(2): May or may not be conjugated to a chemical probe
KCGSPSDSSTTEEMEVAVSKA

SEQ ID NO: 5678 - protein, 35 aa, Homo sapiens
  Table 3 sequence identifier: P30622_C150
  MOD_RES (7)..(7): May or may not be conjugated to a chemical probe
RATSPLCTSTASMVSSSPSTPSNIPQKPSQPAAKE

SEQ ID NO: 5679 - protein, 18 aa, Homo sapiens
  Table 3 sequence identifier: Q06481_C133
  MOD_RES (2)..(2): May or may not be conjugated to a chemical probe
KCLVGEFVSDVLLVPEKC

SEQ ID NO: 5680 - protein, 23 aa, Homo sapiens
  Table 3 sequence identifier: Q9NR12_C311
  MOD_RES (20)..(20): May or may not be conjugated to a chemical probe
RYLVALGHAYHPEEFVCSQCGKV

SEQ ID NO: 5681 - protein, 12 aa, Homo sapiens
  Table 3 sequence identifier: A6NHR9_C505
  MOD_RES (8)..(8): May or may not be conjugated to a chemical probe
RGLAPIECYNRI

SEQ ID NO: 5682 - protein, 9 aa, Homo sapiens
  Table 3 sequence identifier: A6NHR9_C1656
  MOD_RES (2)..(2): May or may not be conjugated to a chemical probe
KCQVEEARL

SEQ ID NO: 5683 - protein, 44 aa, Homo sapiens
  Table 3 sequence identifier: O75600_C134
  MOD_RES (10)..(10): May or may not be conjugated to a chemical probe
REDAILYPSCYDANAGLFEALLTPEDAVLSDELNHASIIDGIRL

SEQ ID NO: 5684 - protein, 20 aa, Homo sapiens
  Table 3 sequence identifier: Q96IU2_C26
  MOD_RES (5)..(5): May or may not be conjugated to a chemical probe
RGGQCPGLGPAPTPTPPGRL

SEQ ID NO: 5685 - protein, 32 aa, Homo sapiens
  Table 3 sequence identifier: Q6PKG0_C1054
  MOD_RES (2)..(2): May or may not be conjugated to a chemical probe
RCPSQSSSRPAAMISQPPTPPTGQPVREDAKW

SEQ ID NO: 5686 - protein, 10 aa, Homo sapiens
  Table 3 sequence identifier: Q5VYS8_C343
  MOD_RES (7)..(7): May or may not be conjugated to a chemical probe
RLYGSSCSRL

SEQ ID NO: 5687 - protein, 16 aa, Homo sapiens
  Table 3 sequence identifier: P35580_C382
  MOD_RES (3)..(3): May or may not be conjugated to a chemical probe
KLCHLLGMNVMEFTRA

SEQ ID NO: 5688 - protein, 9 aa, Homo sapiens
  Table 3 sequence identifier: P49023_C546
  MOD_RES (2)..(2): May or may not be conjugated to a chemical probe
RCITAMAKK

SEQ ID NO: 5689 - protein, 30 aa, Homo sapiens
  Table 3 sequence identifier: Q9NVS9_C72
  MOD_RES (13)..(13): May or may not be conjugated to a chemical probe
KQFAAWFEEAVQCPDIGEANAMCLATCTRD

SEQ ID NO: 5690 - protein, 11 aa, Homo sapiens
  Table 3 sequence identifier: Q9NQG7_C547
  MOD_RES (8)..(8): May or may not be conjugated to a chemical probe
RMNLYTHCVKG

SEQ ID NO: 5691 - protein, 13 aa, Homo sapiens
  Table 3 sequence identifier: Q14289_C562
  MOD_RES (10)..(10): May or may not be conjugated to a chemical probe
RNILVASPECVKL

SEQ ID NO: 5692 - protein, 21 aa, Homo sapiens
  Table 3 sequence identifier: Q96P47_C611
  MOD_RES (19)..(19): May or may not be conjugated to a chemical probe
RELWVQSVQAQILASLQGCRS

SEQ ID NO: 5693 - protein, 16 aa, Homo sapiens
  Table 3 sequence identifier: Q92621_C921
  MOD_RES (4)..(4): May or may not be conjugated to a chemical probe
KILCCISCNSNIQIKL

SEQ ID NO: 5694 - protein, 11 aa, Homo sapiens
  Table 3 sequence identifier: Q9BTA9_C615
  MOD_RES (3)..(3): May or may not be conjugated to a chemical probe
RVCEIQATLRE

SEQ ID NO: 5695 - protein, 17 aa, Homo sapiens
  Table 3 sequence identifier: Q02241_C165
  MOD_RES (8)..(8): May or may not be conjugated to a chemical probe
RNSMDIQCEVDALLERQ

SEQ ID NO: 5696 - protein, 10 aa, Homo sapiens
  Table 3 sequence identifier: Q02241_C412
  MOD_RES (5)..(5): May or may not be conjugated to a chemical probe
RMIVCVNPKA

SEQ ID NO: 5697 - protein, 31 aa, Homo sapiens
  Table 3 sequence identifier: P41229_C1047
  MOD_RES (18)..(18): May or may not be conjugated to a chemical probe
RAWIADVDEIQNGDHYPCLDDLEGLVAVGRD

SEQ ID NO: 5698 - protein, 27 aa, Homo sapiens
  Table 3 sequence identifier: Q92538_C158
  MOD_RES (18)..(18): May or may not be conjugated to a chemical probe
RTLLLTPVGAHLTNESVCEIMQSCFRI

SEQ ID NO: 5699 - protein, 14 aa, Homo sapiens
  Table 3 sequence identifier: Q9UEY8_C73
  MOD_RES (6)..(6): May or may not be conjugated to a chemical probe
REDLECLIQEQMKK

SEQ ID NO: 5700 - protein, 33 aa, Homo sapiens
  Table 3 sequence identifier: Q70J99_C448
  MOD_RES (7)..(7): May or may not be conjugated to a chemical probe
KAFGELCPNTAPLPQLVTEALQTGTTEWFHLKQ

SEQ ID NO: 5701 - protein, 30 aa, Homo sapiens
  Table 3 sequence identifier: P20339_C63
  MOD_RES (22)..(22): May or may not be conjugated to a chemical probe
KGQFHEFQESTIGAAFLTQTVCLDDTTVKF

SEQ ID NO: 5702 - protein, 10 aa, Homo sapiens
  Table 3 sequence identifier: Q9NZ08_C498
  MOD_RES (7)..(7): May or may not be conjugated to a chemical probe
KGMDGFCSRS

SEQ ID NO: 5703 - protein, 19 aa, Homo sapiens
  Table 3 sequence identifier: Q9NZ09_C45
  MOD_RES (13)..(13): May or may not be conjugated to a chemical probe
KVGLPIGFSLPDCLQVVRE

SEQ ID NO: 5704 - protein, 44 aa, Homo sapiens
  Table 3 sequence identifier: Q96IQ9_C75
  MOD_RES (18)..(18): May or may not be conjugated to a chemical probe
RGGAGGMQQGSSPAPDSCQPGPGPSPGLTSIVSGTSEDLRPPRR

SEQ ID NO: 5705 - protein, 14 aa, Homo sapiens
  Table 3 sequence identifier: Q96IQ9_C134
  MOD_RES (4)..(4): May or may not be conjugated to a chemical probe
RTHCPPTQSLEGKL

SEQ ID NO: 5706 - protein, 14 aa, Homo sapiens
  Table 3 sequence identifier: P55039_C270
  MOD_RES (10)..(10): May or may not be conjugated to a chemical probe
RKPNSVVISCGMKL

SEQ ID NO: 5707 - protein, 14 aa, Homo sapiens
  Table 3 sequence identifier: Q9H4A4_C254
  MOD_RES (7)..(7): May or may not be conjugated to a chemical probe
RVWAEPCLIDAAKE

SEQ ID NO: 5708 - protein, 13 aa, Homo sapiens
  Table 3 sequence identifier: P15170_C453
  MOD_RES (9)..(9): May or may not be conjugated to a chemical probe
RFVKQDQVCIARL

SEQ ID NO: 5709 - protein, 26 aa, Homo sapiens
  Table 3 sequence identifier: O75152_C588
  MOD_RES (7)..(7): May or may not be conjugated to a chemical probe
RGDVASCNTQVAEKPVLTAVPGITRH

SEQ ID NO: 5710 - protein, 35 aa, Homo sapiens
  Table 3 sequence identifier: Q9BWD1_C158
  MOD_RES (23)..(23): May or may not be conjugated to a chemical probe
KIGEMPLTDSILCDGLTDAFHNCHMGITAENVAKK

SEQ ID NO: 5711 - protein, 15 aa, Homo sapiens
  Table 3 sequence identifier: Q9UJX4_C203
  MOD_RES (7)..(7): May or may not be conjugated to a chemical probe
REEEVSCSGPLSQKQ

SEQ ID NO: 5712 - protein, 23 aa, Homo sapiens
  Table 3 sequence identifier: Q96E11_C154
  MOD_RES (16)..(16): May or may not be conjugated to a chemical probe
KSPQLILVNMASFPECTAAAIKA

SEQ ID NO: 5713 - protein, 11 aa, Homo sapiens
  Table 3 sequence identifier: Q16666_C679
  MOD_RES (6)..(6): May or may not be conjugated to a chemical probe
KINQLCSQTKG

SEQ ID NO: 5714 - protein, 15 aa, Homo sapiens
  Table 3 sequence identifier: O00622_C100
  MOD_RES (9)..(9): May or may not be conjugated to a chemical probe
RAQSEGRPCEYNSRI

SEQ ID NO: 5715 - protein, 25 aa, Homo sapiens
  Table 3 sequence identifier: O00629_C417
  MOD_RES (18)..(18): May or may not be conjugated to a chemical probe
RKDQVAYLIQQNVIPPFCNLLTVKD

SEQ ID NO: 5716 - protein, 17 aa, Homo sapiens
  Table 3 sequence identifier: P40227_C282
  MOD_RES (3)..(3): May or may not be conjugated to a chemical probe
KVCGDSDKGFVVINQKG

SEQ ID NO: 5717 - protein, 11 aa, Homo sapiens
  Table 3 sequence identifier: Q12830_C2697
  MOD_RES (5)..(5): May or may not be conjugated to a chemical probe
RMIVCNQVMKY

SEQ ID NO: 5718 - protein, 17 aa, Homo sapiens
  Table 3 sequence identifier: P48960_C513
  MOD_RES (10)..(10): May or may not be conjugated to a chemical probe
RGGHWATEGCQVLGSKN

SEQ ID NO: 5719 - protein, 15 aa, Homo sapiens
  Table 3 sequence identifier: Q9NRZ9_C836
  MOD_RES (13)..(13): May or may not be conjugated to a chemical probe
KILENSEDSSPECLF

SEQ ID NO: 5720 - protein, 8 aa, Homo sapiens
  Table 3 sequence identifier: P02765_C230
  MOD_RES (6)..(6): May or may not be conjugated to a chemical probe
KQYGFCKA

SEQ ID NO: 5721 - protein, 16 aa, Homo sapiens
  Table 3 sequence identifier: Q9NTZ6_C545
  MOD_RES (3)..(3): May or may not be conjugated to a chemical probe
KVCAHITNIPFSITKM

SEQ ID NO: 5722 - protein, 19 aa, Homo sapiens
  Table 3 sequence identifier: P20618_C89
  MOD_RES (13)..(13): May or may not be conjugated to a chemical probe
KTVIGCSGFHGDCLTLTKI

SEQ ID NO: 5723 - protein, 20 aa, Homo sapiens
  Table 3 sequence identifier: Q15365_C118
  MOD_RES (18)..(18): May or may not be conjugated to a chemical probe
RLVVPATQCGSLIGKGGCKI

SEQ ID NO: 5724 - protein, 29 aa, Homo sapiens
  Table 3 sequence identifier: Q9BVL4_C629
  MOD_RES (9)..(9): May or may not be conjugated to a chemical probe
KLLETPYHCEAGAATDAEATEADGADGRQ

SEQ ID NO: 5725 - protein, 12 aa, Homo sapiens
  Table 3 sequence identifier: B5ME19_C79
  MOD_RES (2)..(2): May or may not be conjugated to a chemical probe
KCLEEFELLGKA

SEQ ID NO: 5726 - protein, 13 aa, Homo sapiens
  Table 3 sequence identifier: Q13905_C817
  MOD_RES (2)..(2): May or may not be conjugated to a chemical probe
RCATSSQPLAARG

SEQ ID NO: 5727 - protein, 28 aa, Homo sapiens
  Table 3 sequence identifier: P29401_C151
  MOD_RES (4)..(4): May or may not be conjugated to a chemical probe
RVYCLLGDGELSEGSVWEAMAFASIYKL

SEQ ID NO: 5728 - protein, 24 aa, Homo sapiens
  Table 3 sequence identifier: P29401_C206
  MOD_RES (3)..(3): May or may not be conjugated to a chemical probe
KRCEAFGWHAIIVDGHSVEELCKA

SEQ ID NO: 5729 - protein, 14 aa, Homo sapiens
  Table 3 sequence identifier: P35244_C81
  MOD_RES (6)..(6): May or may not be conjugated to a chemical probe
KATILCTSYVQFKE

SEQ ID NO: 5730 - protein, 25 aa, Homo sapiens
  Table 3 sequence identifier: Q8WUB8_C57
  MOD_RES (3)..(3): May or may not be conjugated to a chemical probe
RSCETSSQDLGFSYYPAENLIEYKW

SEQ ID NO: 5731 - protein, 26 aa, Homo sapiens
  Table 3 sequence identifier: P49711_C155
  MOD_RES (12)..(12): May or may not be conjugated to a chemical probe
KEGLAESEPMICHTLPLPEGFQVVKV

SEQ ID NO: 5732 - protein, 55 aa, Homo sapiens
  Table 3 sequence identifier: Q9UKL0_C35
  MOD_RES (21)..(21): May or may not be conjugated to a chemical probe
RNNAAASASAAAASAAASAACASPAATAASGAAASSASAAAASAAAAPNNGQNKS

SEQ ID NO: 5733 - protein, 12 aa, Homo sapiens
  Table 3 sequence identifier: Q92835_C506
  MOD_RES (6)..(6): May or may not be conjugated to a chemical probe
RISHICTDNVKT

SEQ ID NO: 5734 - protein, 21 aa, Homo sapiens
  Table 3 sequence identifier: Q9H3M7_C384
  MOD_RES (14)..(14): May or may not be conjugated to a chemical probe
KFMPPPTYTEVDPCILNNNVQ

SEQ ID NO: 5735 - protein, 11 aa, Homo sapiens
  Table 3 sequence identifier: Q92598_C650
  MOD_RES (5)..(5): May or may not be conjugated to a chemical probe
RDKLCGPYEKF

SEQ ID NO: 5736 - protein, 19 aa, Homo sapiens
  Table 3 sequence identifier: Q09161_C36
  MOD_RES (17)..(17): May or may not be conjugated to a chemical probe
KTSDANETEDHLESLICKV

SEQ ID NO: 5737 - protein, 15 aa, Homo sapiens
  Table 3 sequence identifier: Q99081_C129
  MOD_RES (8)..(8): May or may not be conjugated to a chemical probe
RDTGLPGCQSSLLRQ

SEQ ID NO: 5738 - protein, 29 aa, Homo sapiens
  Table 3 sequence identifier: Q9Y4G6_C810
  MOD_RES (11)..(11): May or may not be conjugated to a chemical probe
RYDQATDTIMCVTESIFSSMGDAGEMVRQ

SEQ ID NO: 5739 - protein, 12 aa, Homo sapiens
  Table 3 sequence identifier: Q14566_C637
  MOD_RES (5)..(5): May or may not be conjugated to a chemical probe
RMHCCDEVQPKH

SEQ ID NO: 5740 - protein, 22 aa, Homo sapiens
  Table 3 sequence identifier: Q8NFQ8_C468
  MOD_RES (20)..(20): May or may not be conjugated to a chemical probe
RISHLVLPVQPVSSIEEQGCLF

SEQ ID NO: 5741 - protein, 23 aa, Homo sapiens
  Table 3 sequence identifier: Q15185_C20
  MOD_RES (9)..(9): May or may not be conjugated to a chemical probe
RDYVFIEFCVEDSKDVNVNFEKS

SEQ ID NO: 5742 - protein, 32 aa, Homo sapiens
  Table 3 sequence identifier: Q92619_C599
  MOD_RES (24)..(24): May or may not be conjugated to a chemical probe
KSSFNVSDVARPEAAGSPPEEGGCTEGTPAKD

SEQ ID NO: 5743 - protein, 17 aa, Homo sapiens
  Table 3 sequence identifier: O94903_C15
  MOD_RES (13)..(13): May or may not be conjugated to a chemical probe
RAGSMSAELGVGCALRA

SEQ ID NO: 5744 - protein, 10 aa, Homo sapiens
  Table 3 sequence identifier: Q8N999_C294
  MOD_RES (2)..(2): May or may not be conjugated to a chemical probe
KCDSAFDIKC

SEQ ID NO: 5745 - protein, 17 aa, Homo sapiens
  Table 3 sequence identifier: Q8NFC6_C2384
  MOD_RES (15)..(15): May or may not be conjugated to a chemical probe
KHKVPMPSLIAENNCRC

SEQ ID NO: 5746 - protein, 21 aa, Homo sapiens
  Table 3 sequence identifier: Q7L8L6_C689
  MOD_RES (15)..(15): May or may not be conjugated to a chemical probe
KSGAMEMAGLCPAACMQTPRM

SEQ ID NO: 5747 - protein, 20 aa, Homo sapiens
  Table 3 sequence identifier: O43795_C779
  MOD_RES (2)..(2): May or may not be conjugated to a chemical probe
RCKEAVTTIAAYWHGTQARR

SEQ ID NO: 5748 - protein, 12 aa, Homo sapiens
  Table 3 sequence identifier: Q9UPN3_C4388
  MOD_RES (10)..(10): May or may not be conjugated to a chemical probe
KGTLVEEINCKG

SEQ ID NO: 5749 - protein, 20 aa, Homo sapiens
  Table 3 sequence identifier: Q9UPN7_C455
  MOD_RES (14)..(14): May or may not be conjugated to a chemical probe
RILTSWEENDRVQCAGGPRK

SEQ ID NO: 5750 - protein, 24 aa, Homo sapiens
  Table 3 sequence identifier: O75569_C106
  MOD_RES (7)..(7): May or may not be conjugated to a chemical probe
KANASICFAVPDPLMPDPSKQPKN

SEQ ID NO: 5751 - protein, 9 aa, Homo sapiens
  Table 3 sequence identifier: Q9UPN9_C153
  MOD_RES (2)..(2): May or may not be conjugated to a chemical probe
RCLPEPERQ

SEQ ID NO: 5752 - protein, 10 aa, Homo sapiens
  Table 3 sequence identifier: Q9UPN9_C754
  MOD_RES (4)..(4): May or may not be conjugated to a chemical probe
RGSCGSSGRT

SEQ ID NO: 5753 - protein, 24 aa, Homo sapiens
  Table 3 sequence identifier: Q9UPN9_C786
  MOD_RES (13)..(13): May or may not be conjugated to a chemical probe
KVKQEPGTEDEICSFSGGVKQEKT

SEQ ID NO: 5754 - protein, 27 aa, Homo sapiens
  Table 3 sequence identifier: Q96HA1_C307
  MOD_RES (24)..(24): May or may not be conjugated to a chemical probe
RSAIPEQIISSTLSSPSSNAPDPCAKE

SEQ ID NO: 5755 - protein, 23 aa, Homo sapiens
  Table 3 sequence identifier: Q99460_C633
  MOD_RES (6)..(6): May or may not be conjugated to a chemical probe
RTPEQCPSVVSLLSESYNPHVRY

SEQ ID NO: 5756 - protein, 12 aa, Homo sapiens
  Table 3 sequence identifier: Q8WY36_C150
  MOD_RES (3)..(3): May or may not be conjugated to a chemical probe
KWCPTTNKPVKS

SEQ ID NO: 5757 - protein, 8 aa, Homo sapiens
  Table 3 sequence identifier: Q8WY36_C712
  MOD_RES (2)..(2): May or may not be conjugated to a chemical probe
KCVPVPRK

SEQ ID NO: 5758 - protein, 39 aa, Homo sapiens
  Table 3 sequence identifier: P40763_C468
  MOD_RES (18)..(18): May or may not be conjugated to a chemical probe
KIDLETHSLPVVVISNICQMPNAWASILWYNMLTNNPKN

SEQ ID NO: 5759 - protein, 23 aa, Homo sapiens
  Table 3 sequence identifier: Q70E73_C847
  MOD_RES (6)..(6): May or may not be conjugated to a chemical probe
KQQSFCAKPPPSPLSPVPSVVKQ

SEQ ID NO: 5760 - protein, 23 aa, Homo sapiens
  Table 3 sequence identifier: Q9BZQ8_C891
  MOD_RES (5)..(5): May or may not be conjugated to a chemical probe
RIHECQWVVEDAPNPDVLLSHKD

SEQ ID NO: 5761 - protein, 21 aa, Homo sapiens
  Table 3 sequence identifier: Q9NUU7_C224
  MOD_RES (18)..(18): May or may not be conjugated to a chemical probe
KISEQIVIGTPGTVLDWCSKL

SEQ ID NO: 5762 - protein, 24 aa, Homo sapiens
  Table 3 sequence identifier: Q96KG9_C503
  MOD_RES (20)..(20): May or may not be conjugated to a chemical probe
RVAGVLGFAATHNLYSMNDCAQKI

SEQ ID NO: 5763 - protein, 9 aa, Homo sapiens
  Table 3 sequence identifier: Q96RU3_C248
  MOD_RES (2)..(2): May or may not be conjugated to a chemical probe
KCLDGIVKA

SEQ ID NO: 5764 - protein, 26 aa, Homo sapiens
  Table 3 sequence identifier: Q14966_C1023
  MOD_RES (15)..(15): May or may not be conjugated to a chemical probe
RFVHLDNLPEDGLQCVLCVGLQFGKV

SEQ ID NO: 5765 - protein, 35 aa, Homo sapiens
  Table 3 sequence identifier: Q96FZ5_C12
  MOD_RES (4)..(4): May or may not be conjugated to a chemical probe
RTTCSSGSALGPGAGAAQPSASPLEGLLDLSYPRT

SEQ ID NO: 5766 - protein, 11 aa, Homo sapiens
  Table 3 sequence identifier: Q96FZ2_C97
  MOD_RES (9)..(9): May or may not be conjugated to a chemical probe
KLQFNTTNCRS

SEQ ID NO: 5767 - protein, 25 aa, Homo sapiens
  Table 3 sequence identifier: P49770_C194
  MOD_RES (9)..(9): May or may not be conjugated to a chemical probe
KFHVIVAECAPFCQGHEMAVNLSKA

SEQ ID NO: 5768 - protein, 41 aa, Homo sapiens
  Table 3 sequence identifier: P40306_C215
  MOD_RES (36)..(36): May or may not be conjugated to a chemical probe
RFQPNMTLEAAQGLLVEAVTAGILGDLGSGGNVDACVITKT

SEQ ID NO: 5769 - protein, 13 aa, Homo sapiens
  Table 3 sequence identifier: O95639_C41
  MOD_RES (7)..(7): May or may not be conjugated to a chemical probe
KSGAAVCEFFLKA

SEQ ID NO: 5770 - protein, 23 aa, Homo sapiens
  Table 3 sequence identifier: P25208_C89
  MOD_RES (7)..(7): May or may not be conjugated to a chemical probe
KECVQECVSEFISFITSEASERC

SEQ ID NO: 5771 - protein, 18 aa, Homo sapiens
  Table 3 sequence identifier: Q9BZ29_C628
  MOD_RES (14)..(14): May or may not be conjugated to a chemical probe
KTPITFEVEEFVPCIPKH

SEQ ID NO: 5772 - protein, 19 aa, Homo sapiens
  Table 3 sequence identifier: Q92688_C114
  MOD_RES (16)..(16): May or may not be conjugated to a chemical probe
KLKDISTLEPLKKLECLKS

SEQ ID NO: 5773 - protein, 31 aa, Homo sapiens
  Table 3 sequence identifier: Q9H6R7_C507
  MOD_RES (11)..(11): May or may not be conjugated to a chemical probe
KEIQSPLSSICDGSIALDAEPVTQPASLPRH

SEQ ID NO: 5774 - protein, 15 aa, Homo sapiens
  Table 3 sequence identifier: O15067_C1044
  MOD_RES (7)..(7): May or may not be conjugated to a chemical probe
RMGPSYCLPPTFPKA

SEQ ID NO: 5775 - protein, 31 aa, Homo sapiens
  Table 3 sequence identifier: P60891_C60
  MOD_RES (12)..(12): May or may not be conjugated to a chemical probe
RGEDVYIVQSGCGEINDNLMELLIMINACKI

SEQ ID NO: 5776 - protein, 37 aa, Homo sapiens
  Table 3 sequence identifier: Q86WN1_C449
  MOD_RES (18)..(18): May or may not be conjugated to a chemical probe
RDLSPTAEDAELSDFEECEETGELFEEPAPQALATRA

SEQ ID NO: 5777 - protein, 8 aa, Homo sapiens
  Table 3 sequence identifier: Q8TAA5_C97
  MOD_RES (2)..(2): May or may not be conjugated to a chemical probe
RCVEDAKI

SEQ ID NO: 5778 - protein, 12 aa, Homo sapiens
  Table 3 sequence identifier: Q9NW64_C48
  MOD_RES (3)..(3): May or may not be conjugated to a chemical probe
KICARPFTVFRW

SEQ ID NO: 5779 - protein, 18 aa, Homo sapiens
  Table 3 sequence identifier: Q7Z4H7_C743
  MOD_RES (10)..(10): May or may not be conjugated to a chemical probe
KILDHLEVSCNKPSTNKT

SEQ ID NO: 5780 - protein, 14 aa, Homo sapiens
  Table 3 sequence identifier: Q13823_C336
  MOD_RES (3)..(3): May or may not be conjugated to a chemical probe
KVCNVAPIAGETKV

SEQ ID NO: 5781 - protein, 36 aa, Homo sapiens
  Table 3 sequence identifier: P49790_C148
  MOD_RES (16)..(16): May or may not be conjugated to a chemical probe
RSHLNFSMLESPALHCQPSTSSAFPIGSSGFSLVKE

SEQ ID NO: 5782 - protein, 8 aa, Homo sapiens
  Table 3 sequence identifier: Q01813_C664
  MOD_RES (6)..(6): May or may not be conjugated to a chemical probe
KGVFDCRK

SEQ ID NO: 5783 - protein, 21 aa, Homo sapiens
  Table 3 sequence identifier: P49792_C503
  MOD_RES (2)..(2): May or may not be conjugated to a chemical probe
KCNSHHSSYQPLCLPLPVCKQ

SEQ ID NO: 5784 - protein, 13 aa, Homo sapiens
  Table 3 sequence identifier: P49792_C3040
  MOD_RES (6)..(6): May or may not be conjugated to a chemical probe
KTFEECQQNLMKL

SEQ ID NO: 5785 - protein, 10 aa, Homo sapiens
  Table 3 sequence identifier: Q00341_C104
  MOD_RES (3)..(3): May or may not be conjugated to a chemical probe
KICLEIMQRT

SEQ ID NO: 5786 - protein, 35 aa, Homo sapiens
  Table 3 sequence identifier: Q00610_C39
  MOD_RES (32)..(32): May or may not be conjugated to a chemical probe
RFQEHLQLQNLGINPANIGFSTLTMESDKFICIRE

SEQ ID NO: 5787 - protein, 20 aa, Homo sapiens
  Table 3 sequence identifier: Q00610_C459
  MOD_RES (10)..(10): May or may not be conjugated to a chemical probe
KWLKEDKLECSEELGDLVKS

SEQ ID NO: 5788 - protein, 50 aa, Homo sapiens
  Table 3 sequence identifier: Q00610_C562
  MOD_RES (40)..(40): May or may not be conjugated to a chemical probe
RISPDQGQQFAQMLVQDEEPLADITQIVDVFMEYNLIQQCTAFLLDALKN

SEQ ID NO: 5789 - protein, 20 aa, Homo sapiens
  Table 3 sequence identifier: Q5SRE5_C585
  MOD_RES (12)..(12): May or may not be conjugated to a chemical probe
KVISTDLSIADCLLPITSRI

SEQ ID NO: 5790 - protein, 11 aa, Homo sapiens
  Table 3 sequence identifier: Q9NVC6_C15
  MOD_RES (8)..(8): May or may not be conjugated to a chemical probe
RISIESACEKQ

SEQ ID NO: 5791 - protein, 19 aa, Homo sapiens
  Table 3 sequence identifier: Q9NVC6_C110
  MOD_RES (8)..(8): May or may not be conjugated to a chemical probe
RSALTEMCVLYDVLSIVRD

SEQ ID NO: 5792 - protein, 20 aa, Homo sapiens
  Table 3 sequence identifier: Q96T76_C599
  MOD_RES (15)..(15): May or may not be conjugated to a chemical probe
RGNMVAQSSDVIAVCQSLRQ

SEQ ID NO: 5793 - protein, 20 aa, Homo sapiens
  Table 3 sequence identifier: Q9Y618_C1297
  MOD_RES (17)..(17): May or may not be conjugated to a chemical probe
KKGHVLSYEGGMSVTQCSKE

SEQ ID NO: 5794 - protein, 30 aa, Homo sapiens
  Table 3 sequence identifier: Q9Y618_C2179
  MOD_RES (23)..(23): May or may not be conjugated to a chemical probe
RHHPQQLSAPLPAPLYSFPGASCPVLDLRR

SEQ ID NO: 5795 - protein, 20 aa, Homo sapiens
  Table 3 sequence identifier: Q969T4_C145
  MOD_RES (14)..(14): May or may not be conjugated to a chemical probe
RIYHCNINSQGVICLDILKD

SEQ ID NO: 5796 - protein, 12 aa, Homo sapiens
  Table 3 sequence identifier: Q9Y613_C936
  MOD_RES (9)..(9): May or may not be conjugated to a chemical probe
RLTHFLDQCARR

SEQ ID NO: 5797 - protein, 26 aa, Homo sapiens
  Table 3 sequence identifier: P09543_C111
  MOD_RES (19)..(19): May or may not be conjugated to a chemical probe
RGAFSEEYKRLDEDLAAYCRRRDIRI

SEQ ID NO: 5798 - protein, 22 aa, Homo sapiens
  Table 3 sequence identifier: P32929_C252
  MOD_RES (16)..(16): May or may not be conjugated to a chemical probe
RFLQNSLGAVPSPIDCYLCNRG

SEQ ID NO: 5799 - protein, 30 aa, Homo sapiens
  Table 3 sequence identifier: O75427_C283
  MOD_RES (19)..(19): May or may not be conjugated to a chemical probe
RGSALGDLAPSRPPSFSPCPAEDLFPGHRY

SEQ ID NO: 5800 - protein, 41 aa, Homo sapiens
  Table 3 sequence identifier: P07339_C110
  MOD_RES (39)..(39): May or may not be conjugated to a chemical probe
KNYMDAQYYGEIGIGTPPQCFTVVFDTGSSNLWVPSIHCKL

SEQ ID NO: 5801 - protein, 27 aa, Homo sapiens
  Table 3 sequence identifier: Q92734_C80
  MOD_RES (24)..(24): May or may not be conjugated to a chemical probe
KYKDEDGDLITIFDSSDLSFAIQCSRI

SEQ ID NO: 5802 - protein, 23 aa, Homo sapiens
  Table 3 sequence identifier: Q00765_C118
  MOD_RES (2)..(2): May or may not be conjugated to a chemical probe
KCGFLLWCMAPSPSNGAELLYKR

SEQ ID NO: 5803 - protein, 9 aa, Homo sapiens
  Table 3 sequence identifier: Q9Y4P8_C328
  MOD_RES (5)..(5): May or may not be conjugated to a chemical probe
RLPFCGHKN

SEQ ID NO: 5804 - protein, 10 aa, Homo sapiens
  Table 3 sequence identifier: Q4V328_C243
  MOD_RES (8)..(8): May or may not be conjugated to a chemical probe
KKKQESFCRL

SEQ ID NO: 5805 - protein, 28 aa, Homo sapiens
  Table 3 sequence identifier: Q86UX6_C425
  MOD_RES (14)..(14): May or may not be conjugated to a chemical probe
RDSSQSENDYLQDCLDAIQQDFVIFNRE

SEQ ID NO: 5806 - protein, 33 aa, Homo sapiens
  Table 3 sequence identifier: P43155_C169
  MOD_RES (20)..(20): May or may not be conjugated to a chemical probe
KVMIDNETLPVEYLGGKPLCMNQYYQILSSCRV

SEQ ID NO: 5807 - protein, 17 aa, Homo sapiens
  Table 3 sequence identifier: Q9BSJ8_C522
  MOD_RES (8)..(8): May or may not be conjugated to a chemical probe
KAVYSTNCPVWEEAFRF

SEQ ID NO: 5808 - protein, 12 aa, Homo sapiens
  Table 3 sequence identifier: P35659_C161
  MOD_RES (4)..(4): May or may not be conjugated to a chemical probe
KSICEVLDLERS

SEQ ID NO: 5809 - protein, 21 aa, Homo sapiens
  Table 3 sequence identifier: P27695_C208
  MOD_RES (7)..(7): May or may not be conjugated to a chemical probe
RKPLVLCGDLNVAHEEIDLRN

SEQ ID NO: 5810 - protein, 27 aa, Homo sapiens
  Table 3 sequence identifier: P46013_C715
  MOD_RES (20)..(20): May or may not be conjugated to a chemical probe
KKPVGEVHSQFSTGHANSPCTIIIGKA

SEQ ID NO: 5811 - protein, 28 aa, Homo sapiens
  Table 3 sequence identifier: P46013_C773
  MOD_RES (14)..(14): May or may not be conjugated to a chemical probe
KTPVKEQPQLTSTCHIAISNSENLLGKQ

SEQ ID NO: 5812 - protein, 14 aa, Homo sapiens
  Table 3 sequence identifier: Q9UJ70_C217
  MOD_RES (12)..(12): May or may not be conjugated to a chemical probe
FAGFCRRFAGFCRK

SEQ ID NO: 5813 - protein, 21 aa, Homo sapiens
  Table 3 sequence identifier: Q7Z5J4_C322
  MOD_RES (13)..(13): May or may not be conjugated to a chemical probe
KYQHYGQQGQGYCQPDAAVRT

SEQ ID NO: 5814 - protein, 32 aa, Homo sapiens
  Table 3 sequence identifier: Q9NRG7_C78
  MOD_RES (15)..(15): May or may not be conjugated to a chemical probe
RITWDELAASGLPSCDAAVNLAGENILNPLRR

SEQ ID NO: 5815 - protein, 18 aa, Homo sapiens
  Table 3 sequence identifier: Q8WXH0_C6161
  MOD_RES (5)..(5): May or may not be conjugated to a chemical probe
RTAACPNSSEVLYTSAKE

SEQ ID NO: 5816 - protein, 17 aa, Homo sapiens
  Table 3 sequence identifier: Q8TC07_C686
  MOD_RES (15)..(15): May or may not be conjugated to a chemical probe
RNDSPTQIPVSSDVCRL

SEQ ID NO: 5817 - protein, 13 aa, Homo sapiens
  Table 3 sequence identifier: Q8N4N3_C254
  MOD_RES (7)..(7): May or may not be conjugated to a chemical probe
RVKPAVCSLLPKE

SEQ ID NO: 5818 - protein, 8 aa, Homo sapiens
  Table 3 sequence identifier: Q99459_C769
  MOD_RES (5)..(5): May or may not be conjugated to a chemical probe
RRLECLKE

SEQ ID NO: 5819 - protein, 24 aa, Homo sapiens
  Table 3 sequence identifier: P11216_C143
  MOD_RES (5)..(5): May or may not be conjugated to a chemical probe
RLAACFLDSMATLGLAAYGYGIRY

SEQ ID NO: 5820 - protein, 17 aa, Homo sapiens
  Table 3 sequence identifier: Q6WCQ1_C831
  MOD_RES (2)..(2): May or may not be conjugated to a chemical probe
KCLENAHLAQALEAERQ

SEQ ID NO: 5821 - protein, 14 aa, Homo sapiens
  Table 3 sequence identifier: Q2TAZ0_C1458
  MOD_RES (2)..(2): May or may not be conjugated to a chemical probe
RCSGPNRPQNSWRT

SEQ ID NO: 5822 - protein, 14 aa, Homo sapiens
  Table 3 sequence identifier: O43324_C147
  MOD_RES (4)..(4): May or may not be conjugated to a chemical probe
RWFCHIQHYPGIRQ

SEQ ID NO: 5823 - protein, 11 aa, Homo sapiens
  Table 3 sequence identifier: Q96MF7_C140
  MOD_RES (4)..(4): May or may not be conjugated to a chemical probe
KKQCGLQADRE

SEQ ID NO: 5824 - protein, 16 aa, Homo sapiens
  Table 3 sequence identifier: Q14653_C222
  MOD_RES (10)..(10): May or may not be conjugated to a chemical probe
RQVFQQTISCPEGLRL

SEQ ID NO: 5825 - protein, 11 aa, Homo sapiens
  Table 3 sequence identifier: Q15428_C56
  MOD_RES (9)..(9): May or may not be conjugated to a chemical probe
KNHLGSYECKL

SEQ ID NO: 5826 - protein, 12 aa, Homo sapiens
  Table 3 sequence identifier: Q9UJU2_C321
  MOD_RES (8)..(8): May or may not be conjugated to a chemical probe
RANVVAECTLKE

SEQ ID NO: 5827 - protein, 13 aa, Homo sapiens
  Table 3 sequence identifier: P60953_C18
  MOD_RES (3)..(3): May or may not be conjugated to a chemical probe
KTCLLISYTTNKF

SEQ ID NO: 5828 - protein, 30 aa, Homo sapiens
  Table 3 sequence identifier: P60953_C81
  MOD_RES (16)..(16): May or may not be conjugated to a chemical probe
RLRPLSYPQTDVFLVCFSVVSPSSFENVKE

SEQ ID NO: 5829 - protein, 13 aa, Homo sapiens
  Table 3 sequence identifier: Q9NYZ3_C539
  MOD_RES (8)..(8): May or may not be conjugated to a chemical probe
RAVGSPLCVPARR

SEQ ID NO: 5830 - protein, 23 aa, Homo sapiens
  Table 3 sequence identifier: Q9UHY7_C202
  MOD_RES (9)..(9): May or may not be conjugated to a chemical probe
RKIADSIGCSTNNILFLTDVTRE

SEQ ID NO: 5831 - protein, 11 aa, Homo sapiens
  Table 3 sequence identifier: O94768_C190
  MOD_RES (7)..(7): May or may not be conjugated to a chemical probe
RKIGHACELRE

SEQ ID NO: 5832 - protein, 29 aa, Homo sapiens
  Table 3 sequence identifier: O15530_C21
  MOD_RES (19)..(19): May or may not be conjugated to a chemical probe
RTTSQLYDAVPIQSSVVLCSCPSPSMVRT

SEQ ID NO: 5833 - protein, 21 aa, Homo sapiens
  Table 3 sequence identifier: P21333_C810
  MOD_RES (2)..(2): May or may not be conjugated to a chemical probe
KCAPGVVGPAEADIDFDIIRN

SEQ ID NO: 5834 - protein, 8 aa, Homo sapiens
  Table 3 sequence identifier: P21333_C1723
  MOD_RES (5)..(5): May or may not be conjugated to a chemical probe
KYVICVRF

SEQ ID NO: 5835 - protein, 48 aa, Homo sapiens
  Table 3 sequence identifier: P21333_C1865
  MOD_RES (21)..(21): May or may not be conjugated to a chemical probe
RYDNMHIPGSPLQFYVDYVNCGHVTAYGPGLTHGVVNKPATFTVNTKD

SEQ ID NO: 5836 - protein, 18 aa, Homo sapiens
  Table 3 sequence identifier: P21333_C2107
  MOD_RES (5)..(5): May or may not be conjugated to a chemical probe
RVTYCPTEPGNYIINIKF

SEQ ID NO: 5837 - protein, 20 aa, Homo sapiens
  Table 3 sequence identifier: Q9BWH6_C84
  MOD_RES (9)..(9): May or may not be conjugated to a chemical probe
RARPSPGHCLPEDEDPEERL

SEQ ID NO: 5838 - protein, 34 aa, Homo sapiens
  Table 3 sequence identifier: P51610_C292
  MOD_RES (5)..(5): May or may not be conjugated to a chemical probe
KEWKCTNTLACLNLDTMAWETILMDTLEDNIPRA

SEQ ID NO: 5839 - protein, 31 aa, Homo sapiens
  Table 3 sequence identifier: P51610_C298
  MOD_RES (8)..(8): May or may not be conjugated to a chemical probe
KCTNTLACLNLDTMAWETILMDTLEDNIPRA

SEQ ID NO: 5840 - protein, 32 aa, Homo sapiens
  Table 3 sequence identifier: P51610_C1187
  MOD_RES (19)..(19): May or may not be conjugated to a chemical probe
RQTSATSTTMTVMATGAPCSAGPLLGPSMARE

SEQ ID NO: 5841 - protein, 15 aa, Homo sapiens
  Table 3 sequence identifier: Q99683_C928
  MOD_RES (3)..(3): May or may not be conjugated to a chemical probe
RACANDLLVDEFLKV

SEQ ID NO: 5842 - protein, 21 aa, Homo sapiens
  Table 3 sequence identifier: Q9BWM7_C193
  MOD_RES (13)..(13): May or may not be conjugated to a chemical probe
RFVPFAAVAAANCINIPLMRQ

SEQ ID NO: 5843 - protein, 11 aa, Homo sapiens
  Table 3 sequence identifier: Q96EM0_C205
  MOD_RES (7)..(7): May or may not be conjugated to a chemical probe
KLGLDICSAKT

SEQ ID NO: 5844 - protein, 26 aa, Homo sapiens
  Table 3 sequence identifier: Q96SZ5_C258
  MOD_RES (16)..(16): May or may not be conjugated to a chemical probe
REVWLLETPQADDFWCEGEPYPGPKV

SEQ ID NO: 5845 - protein, 11 aa, Homo sapiens
  Table 3 sequence identifier: Q93100_C348
  MOD_RES (2)..(2): May or may not be conjugated to a chemical probe
RCYYKPAEIKL

SEQ ID NO: 5846 - protein, 10 aa, Homo sapiens
  Table 3 sequence identifier: O75410_C715
  MOD_RES (2)..(2): May or may not be conjugated to a chemical probe
KCAQDYLARV

SEQ ID NO: 5847 - protein, 15 aa, Homo sapiens
  Table 3 sequence identifier: P35711_C492
  MOD_RES (13)..(13): May or may not be conjugated to a chemical probe
KVAVVNSLGLNNCRT

SEQ ID NO: 5848 - protein, 46 aa, Homo sapiens
  Table 3 sequence identifier: Q9BXW9_C607
  MOD_RES (9)..(9): May or may not be conjugated to a chemical probe
RANLSDEQCTQVTSLLQLVHSCSEQSPQASALYYDEFANLIQHEKL

SEQ ID NO: 5849 - protein, 14 aa, Homo sapiens
  Table 3 sequence identifier: Q9Y4W2_C456
  MOD_RES (5)..(5): May or may not be conjugated to a chemical probe
RLFNCSASLDWPRM

SEQ ID NO: 5850 - protein, 12 aa, Homo sapiens
  Table 3 sequence identifier: P27635_C80
  MOD_RES (3)..(3): May or may not be conjugated to a chemical probe
KSCGKDGFHIRV

SEQ ID NO: 5851 - protein, 18 aa, Homo sapiens
  Table 3 sequence identifier: O95294_C611
  MOD_RES (8)..(8): May or may not be conjugated to a chemical probe
KSPEWQMCHSIPVSHIRA

SEQ ID NO: 5852 - protein, 27 aa, Homo sapiens
  Table 3 sequence identifier: Q9Y4E6_C1103
  MOD_RES (18)..(18): May or may not be conjugated to a chemical probe
KVQEEEHDLVDDDITTGCLSSVPQMKK

SEQ ID NO: 5853 - protein, 15 aa, Homo sapiens
  Table 3 sequence identifier: Q92616_C939
  MOD_RES (4)..(4): May or may not be conjugated to a chemical probe
KSWCQEELSVAVKRA

SEQ ID NO: 5854 - protein, 13 aa, Homo sapiens
  Table 3 sequence identifier: Q92615_C633
  MOD_RES (11)..(11): May or may not be conjugated to a chemical probe
RLPSALTATACKS

SEQ ID NO: 5855 - protein, 11 aa, Homo sapiens
  Table 3 sequence identifier: Q99661_C455
  MOD_RES (9)..(9): May or may not be conjugated to a chemical probe
KMIDMGSACRT

SEQ ID NO: 5856 - protein, 15 aa, Homo sapiens
  Table 3 sequence identifier: Q9Y4E8_C264
  MOD_RES (6)..(6): May or may not be conjugated to a chemical probe
KNSNYCLPSYTAYKN

SEQ ID NO: 5857 - protein, 25 aa, Homo sapiens
  Table 3 sequence identifier: P24468_C213
  MOD_RES (19)..(19): May or may not be conjugated to a chemical probe
RFGSQCMQPNNIMGIENICELAARM

SEQ ID NO: 5858 - protein, 10 aa, Homo sapiens
  Table 3 sequence identifier: P43490_C39
  MOD_RES (8)..(8): May or may not be conjugated to a chemical probe
KVYSYFECRE

SEQ ID NO: 5859 - protein, 10 aa, Homo sapiens
  Table 3 sequence identifier: Q8TE73_C4621
  MOD_RES (7)..(7): May or may not be conjugated to a chemical probe
RGVALLCDVK

SEQ ID NO: 5860 - protein, 35 aa, Homo sapiens
  Table 3 sequence identifier: Q99996_C3868
  MOD_RES (24)..(24): May or may not be conjugated to a chemical probe
RSPLPFQNRYPGTPADFNPGSLACSQLQNYDPDRA

SEQ ID NO: 5861 - protein, 13 aa, Homo sapiens
  Table 3 sequence identifier: P46060_C141
  MOD_RES (5)..(5): May or may not be conjugated to a chemical probe
KSSACFTLQELKL

SEQ ID NO: 5862 - protein, 43 aa, Homo sapiens
  Table 3 sequence identifier: Q8WV28_C343
  MOD_RES (32)..(32): May or may not be conjugated to a chemical probe
RFTEGGNPTVDGPLPSFSSNSTISEQEAGVLCKPWYAGACDRK

SEQ ID NO: 5863 - protein, 9 aa, Homo sapiens
  Table 3 sequence identifier: Q8WV24_C242
  MOD_RES (5)..(5): May or may not be conjugated to a chemical probe
KTVDCVERK

SEQ ID NO: 5864 - protein, 8 aa, Homo sapiens
  Table 3 sequence identifier: P49327_C313
  MOD_RES (4)..(4): May or may not be conjugated to a chemical probe
RALCATRQ

SEQ ID NO: 5865 - protein, 9 aa, Homo sapiens
  Table 3 sequence identifier: P49327_C1881
  MOD_RES (4)..(4): May or may not be conjugated to a chemical probe
KTFCPAHKS

SEQ ID NO: 5866 - protein, 25 aa, Homo sapiens
  Table 3 sequence identifier: O75348_C104
  MOD_RES (13)..(13): May or may not be conjugated to a chemical probe
RDEVLDNLLAFVCDIRPEIHENYRI

SEQ ID NO: 5867 - protein, 17 aa, Homo sapiens
  Table 3 sequence identifier: Q9UDR5_C342
  MOD_RES (10)..(10): May or may not be conjugated to a chemical probe
KFSPAGVEGCPALPHKL

SEQ ID NO: 5868 - protein, 25 aa, Homo sapiens
  Table 3 sequence identifier: Q13363_C312
  MOD_RES (8)..(8): May or may not be conjugated to a chemical probe
KDAPNLICTPHAAWYSEQASIEMRE

SEQ ID NO: 5869 - protein, 38 aa, Homo sapiens
  Table 3 sequence identifier: O14929_C376
  MOD_RES (2)..(2): May or may not be conjugated to a chemical probe
KCLRPEELTNQMNQIEISMQHEQLEESFQELVEDYRRV

SEQ ID NO: 5870 - protein, 9 aa, Homo sapiens
  Table 3 sequence identifier: O14920_C464
  MOD_RES (5)..(5): May or may not be conjugated to a chemical probe
RNNSCLSKM

SEQ ID NO: 5871 - protein, 13 aa, Homo sapiens
  Table 3 sequence identifier: Q9NYK6_C73
  MOD_RES (10)..(10): May or may not be conjugated to a chemical probe
KYHLIANQGCPRS

SEQ ID NO: 5872 - protein, 14 aa, Homo sapiens
  Table 3 sequence identifier: Q99536_C50
  MOD_RES (2)..(2): May or may not be conjugated to a chemical probe
RCLVLTGFGGYDKV

SEQ ID NO: 5873 - protein, 14 aa, Homo sapiens
  Table 3 sequence identifier: Q8N1G2_C9
  MOD_RES (7)..(7): May or may not be conjugated to a chemical probe
RRTDPECTAPIKKQ

SEQ ID NO: 5874 - protein, 29 aa, Homo sapiens
  Table 3 sequence identifier: Q96ME1_C459
  MOD_RES (7)..(7): May or may not be conjugated to a chemical probe
RVGVQSCPSPFSGQACPQPSSVFWSLLKN

SEQ ID NO: 5875 - protein, 21 aa, Homo sapiens
  Table 3 sequence identifier: Q9BSQ5_C170
  MOD_RES (15)..(15): May or may not be conjugated to a chemical probe
KTAQDPGISPSQSLCAESSRG

SEQ ID NO: 5876 - protein, 30 aa, Homo sapiens
  Table 3 sequence identifier: Q00688_C133
  MOD_RES (8)..(8): May or may not be conjugated to a chemical probe
KKGDVVHCWYTGTLQDGTVFDTNIQTSAKK

SEQ ID NO: 5877 - protein, 10 aa, Homo sapiens
  Table 3 sequence identifier: Q96FX7_C217
  MOD_RES (3)..(3): May or may not be conjugated to a chemical probe
RTCQALAARG

SEQ ID NO: 5878 - protein, 28 aa, Homo sapiens
  Table 3 sequence identifier: Q15691_C45
  MOD_RES (12)..(12): May or may not be conjugated to a chemical probe
KIEQLCSGAAYCQFMDMLFPGSIALKKV

SEQ ID NO: 5879 - protein, 15 aa, Homo sapiens
  Table 3 sequence identifier: Q9NS87_C576
  MOD_RES (7)..(7): May or may not be conjugated to a chemical probe
KAQKEPCLFANTEKL

SEQ ID NO: 5880 - protein, 11 aa, Homo sapiens
  Table 3 sequence identifier: P13489_C220
  MOD_RES (4)..(4): May or may not be conjugated to a chemical probe
RDLCGIVASKA

SEQ ID NO: 5881 - protein, 10 aa, Homo sapiens
  Table 3 sequence identifier: Q9BPY3_C319
  MOD_RES (4)..(4): May or may not be conjugated to a chemical probe
RLTCEISTRG

SEQ ID NO: 5882 - protein, 13 aa, Homo sapiens
  Table 3 sequence identifier: Q63HN8_C4348
  MOD_RES (6)..(6): May or may not be conjugated to a chemical probe
KAVLECKPLGIKT

SEQ ID NO: 5883 - protein, 19 aa, Homo sapiens
  Table 3 sequence identifier: Q14839_C1018
  MOD_RES (2)..(2): May or may not be conjugated to a chemical probe
KCCNHPYLFPVAAMEAPKM

SEQ ID NO: 5884 - protein, 20 aa, Homo sapiens
  Table 3 sequence identifier: Q14839_C1019
  MOD_RES (4)..(4): May or may not be conjugated to a chemical probe
KKCCNHPYLFPVAAMEAPKM

SEQ ID NO: 5885 - protein, 18 aa, Homo sapiens
  Table 3 sequence identifier: Q14839_C1121
  MOD_RES (11)..(11): May or may not be conjugated to a chemical probe
RFNAPGAQQFCFLLSTRA

SEQ ID NO: 5886 - protein, 13 aa, Homo sapiens
  Table 3 sequence identifier: Q9HD33_C87
  MOD_RES (8)..(8): May or may not be conjugated to a chemical probe
KSGAAWTCQQLRN

SEQ ID NO: 5887 - protein, 14 aa, Homo sapiens
  Table 3 sequence identifier: O14745_C206
  MOD_RES (9)..(9): May or may not be conjugated to a chemical probe
RIVEVNGVCMEGKQ

SEQ ID NO: 5888 - protein, 31 aa, Homo sapiens
  Table 3 sequence identifier: O15287_C314
  MOD_RES (27)..(27): May or may not be conjugated to a chemical probe
RLYQQLGDTTAELESLELLVEALNVPCSSKA

SEQ ID NO: 5889 - protein, 10 aa, Homo sapiens
  Table 3 sequence identifier: Q7L2J0_C429
  MOD_RES (5)..(5): May or may not be conjugated to a chemical probe
RNPSCEDGRL

SEQ ID NO: 5890 - protein, 37 aa, Homo sapiens
  Table 3 sequence identifier: Q9BUK6_C561
  MOD_RES (28)..(28): May or may not be conjugated to a chemical probe
RWASFMDAGVEHDDVAELLQELQSLAQCYQGGDSLVD

SEQ ID NO: 5891 - protein, 39 aa, Homo sapiens
  Table 3 sequence identifier: Q9H5N1_C422
  MOD_RES (35)..(35): May or may not be conjugated to a chemical probe
RAEQLPSSAPQGSQQEQGEEESLPSSVPELQQLLCCTRQ

SEQ ID NO: 5892 - protein, 12 aa, Homo sapiens
  Table 3 sequence identifier: Q7Z3K3_C1267
  MOD_RES (8)..(8): May or may not be conjugated to a chemical probe
KIQPLDVCIKRT

SEQ ID NO: 5893 - protein, 24 aa, Homo sapiens
  Table 3 sequence identifier: Q96EN8_C558
  MOD_RES (19)..(19): May or may not be conjugated to a chemical probe
RVWNNSSTVNAVPVAPPVCDVART

SEQ ID NO: 5894 - protein, 12 aa, Homo sapiens
  Table 3 sequence identifier: P18074_C491
  MOD_RES (5)..(5): May or may not be conjugated to a chemical probe
RVCLCPMIIGRG

SEQ ID NO: 5895 - protein, 16 aa, Homo sapiens
  Table 3 sequence identifier: Q9UKU7_C251
  MOD_RES (8)..(8): May or may not be conjugated to a chemical probe
RAVIFEDCAVPVANRI

SEQ ID NO: 5896 - protein, 10 aa, Homo sapiens
  Table 3 sequence identifier: Q96IY1_C175
  MOD_RES (2)..(2): May or may not be conjugated to a chemical probe
KCRGETVAKE

SEQ ID NO: 5897 - protein, 20 aa, Homo sapiens
  Table 3 sequence identifier: Q06136_C121
  MOD_RES (11)..(11): May or may not be conjugated to a chemical probe
KLGPVDMLVNCAGMAVSGKF

SEQ ID NO: 5898 - protein, 12 aa, Homo sapiens
  Table 3 sequence identifier: O75947_C101
  MOD_RES (3)..(3): May or may not be conjugated to a chemical probe
KSCAEWVSLSKA

SEQ ID NO: 5899 - protein, 15 aa, Homo sapiens
  Table 3 sequence identifier: P14921_C99
  MOD_RES (3)..(3): May or may not be conjugated to a chemical probe
KFCMNGAALCALGKD

SEQ ID NO: 5900 - protein, 14 aa, Homo sapiens
  Table 3 sequence identifier: Q9NRY4_C924
  MOD_RES (7)..(7): May or may not be conjugated to a chemical probe
RFTSIPCSQPQHKL

SEQ ID NO: 5901 - protein, 18 aa, Homo sapiens
  Table 3 sequence identifier: O60832_C74
  MOD_RES (10)..(10): May or may not be conjugated to a chemical probe
RTTHYTPLACGSNPLKRE

SEQ ID NO: 5902 - protein, 33 aa, Homo sapiens
  Table 3 sequence identifier: O95352_C524
  MOD_RES (9)..(9): May or may not be conjugated to a chemical probe
KQQGAGDLCPNHPVASADLLGSSLFANIPGYKL

SEQ ID NO: 5903 - protein, 27 aa, Homo sapiens
  Table 3 sequence identifier: O95359_C2573
  MOD_RES (9)..(9): May or may not be conjugated to a chemical probe
RMSESPTPCSGSSFEETEALVNTAAKN

SEQ ID NO: 5904 - protein, 10 aa, Homo sapiens
  Table 3 sequence identifier: Q6ZT12_C1858
  MOD_RES (8)..(8): May or may not be conjugated to a chemical probe
RGKPLYICKE

SEQ ID NO: 5905 - protein, 26 aa, Homo sapiens
  Table 3 sequence identifier: Q92990_C537
  MOD_RES (6)..(6): May or may not be conjugated to a chemical probe
KSKDLCSITVSGEEIPNMPPEMQLKV

SEQ ID NO: 5906 - protein, 40 aa, Homo sapiens
  Table 3 sequence identifier: Q9Y383_C193
  MOD_RES (28)..(28): May or may not be conjugated to a chemical probe
KREAEEVYRNSMPASSFQQQKLRVCEVCSAYLGLHDNDRR

SEQ ID NO: 5907 - protein, 21 aa, Homo sapiens
  Table 3 sequence identifier: O75400_C39
  MOD_RES (8)..(8): May or may not be conjugated to a chemical probe
RLSGSSLCSGSWVSADGFLRR

SEQ ID NO: 5908 - protein, 23 aa, Homo sapiens
  Table 3 sequence identifier: P00519_C1100
  MOD_RES (6)..(6): May or may not be conjugated to a chemical probe
RELQICPATAGSGPAATQDFSKL

SEQ ID NO: 5909 - protein, 21 aa, Homo sapiens
  Table 3 sequence identifier: P17676_C11
  MOD_RES (9)..(9): May or may not be conjugated to a chemical probe
RLVAWDPACLPLPPPPPAFKS

SEQ ID NO: 5910 - protein, 11 aa, Homo sapiens
  Table 3 sequence identifier: P53990_C125
  MOD_RES (8)..(8): May or may not be conjugated to a chemical probe
KIVADQLCAKY

SEQ ID NO: 5911 - protein, 35 aa, Homo sapiens
  Table 3 sequence identifier: P08729_C274
  MOD_RES (22)..(22): May or may not be conjugated to a chemical probe
RSLDLDGIIAEVKAQYEEMAKCSRAEAEAWYQTKF

SEQ ID NO: 5912 - protein, 20 aa, Homo sapiens
  Table 3 sequence identifier: O15357_C1187
  MOD_RES (14)..(14): May or may not be conjugated to a chemical probe
RESIQEDLAEEAPCLQGGRA

SEQ ID NO: 5913 - protein, 11 aa, Homo sapiens
  Table 3 sequence identifier: Q8IX01_C970
  MOD_RES (4)..(4): May or may not be conjugated to a chemical probe
KRVCLIQEPKV

SEQ ID NO: 5914 - protein, 28 aa, Homo sapiens
  Table 3 sequence identifier: Q9Y4D8_C1488
  MOD_RES (10)..(10): May or may not be conjugated to a chemical probe
KLADYVVPGCQTVLSPTASEPDTTLTKT

SEQ ID NO: 5915 - protein, 16 aa, Homo sapiens
  Table 3 sequence identifier: O60711_C376
  MOD_RES (9)..(9): May or may not be conjugated to a chemical probe
REQNDKTYCQPCFNKL

SEQ ID NO: 5916 - protein, 13 aa, Homo sapiens
  Table 3 sequence identifier: Q96IV0_C197
  MOD_RES (5)..(5): May or may not be conjugated to a chemical probe
KALACIPVQELKR

SEQ ID NO: 5917 - protein, 16 aa, Homo sapiens
  Table 3 sequence identifier: P35637_C428
  MOD_RES (2)..(2): May or may not be conjugated to a chemical probe
KCPNPTCENMNFSWRN

SEQ ID NO: 5918 - protein, 21 aa, Homo sapiens
  Table 3 sequence identifier: Q6KC79_C1066
  MOD_RES (18)..(18): May or may not be conjugated to a chemical probe
KELPPELLAEIESTMPLCERV

SEQ ID NO: 5919 - protein, 11 aa, Homo sapiens
  Table 3 sequence identifier: Q92973_C467
  MOD_RES (5)..(5): May or may not be conjugated to a chemical probe
RSITCWTLSRY

SEQ ID NO: 5920 - protein, 16 aa, Homo sapiens
  Table 3 sequence identifier: Q92973_C683
  MOD_RES (11)..(11): May or may not be conjugated to a chemical probe
RSNILTLMYQCMQDKM

SEQ ID NO: 5921 - protein, 45 aa, Homo sapiens
  Table 3 sequence identifier: Q9BTE1_C160
  MOD_RES (34)..(34): May or may not be conjugated to a chemical probe
KILDNTVLPPETVVPPFTVFSGCPGLFSGELPECTQELMIDVTKS

SEQ ID NO: 5922 - protein, 12 aa, Homo sapiens
  Table 3 sequence identifier: P54577_C501
  MOD_RES (6)..(6): May or may not be conjugated to a chemical probe
KISEECIAQWKQ

SEQ ID NO: 5923 - protein, 11 aa, Homo sapiens
  Table 3 sequence identifier: O95218_C74
  MOD_RES (3)..(3): May or may not be conjugated to a chemical probe
KTCSNVNWARR

SEQ ID NO: 5924 - protein, 30 aa, Homo sapiens
  Table 3 sequence identifier: Q9NPI1_C367
  MOD_RES (26)..(26): May or may not be conjugated to a chemical probe
RRKPDGTTTLGLLHPVDPIVGEPGYCPVRL

SEQ ID NO: 5925 - protein, 24 aa, Homo sapiens
  Table 3 sequence identifier: Q92576_C1771
  MOD_RES (16)..(16): May or may not be conjugated to a chemical probe
RGSAVATSHFEVGNTCPSEFPSKS

SEQ ID NO: 5926 - protein, 36 aa, Homo sapiens
  Table 3 sequence identifier: Q92575_C186
  MOD_RES (23)..(23): May or may not be conjugated to a chemical probe
KSDTATGGESAGHATSSQEPSGCSDQRPAEDLNIRV

SEQ ID NO: 5927 - protein, 17 aa, Homo sapiens
  Table 3 sequence identifier: P24928_C13
  MOD_RES (13)..(13): May or may not be conjugated to a chemical probe
MHGGGPPSGDSACPLRT

SEQ ID NO: 5928 - protein, 14 aa, Homo sapiens
  Table 3 sequence identifier: P24928_C451
  MOD_RES (4)..(4): May or may not be conjugated to a chemical probe
RHMCDGDIVIFNRQ

SEQ ID NO: 5929 - protein, 22 aa, Homo sapiens
  Table 3 sequence identifier: P24928_C1287
  MOD_RES (2)..(2): May or may not be conjugated to a chemical probe
RCIESNMLTDMTLQGIEQISKV

SEQ ID NO: 5930 - protein, 18 aa, Homo sapiens
  Table 3 sequence identifier: Q8IVH4_C100
  MOD_RES (3)..(3): May or may not be conjugated to a chemical probe
RACLAEAITLVESTHSRK

SEQ ID NO: 5931 - protein, 42 aa, Homo sapiens
  Table 3 sequence identifier: Q68E01_C596
  MOD_RES (9)..(9): May or may not be conjugated to a chemical probe
KGSDTEAQCEVMQEIVDQVLEEDFDSEQLSVLASCLQELFKA

SEQ ID NO: 5932 - protein, 12 aa, Homo sapiens
  Table 3 sequence identifier: Q15751_C2525
  MOD_RES (9)..(9): May or may not be conjugated to a chemical probe
KSLSALLGCSKY

SEQ ID NO: 5933 - protein, 21 aa, Homo sapiens
  Table 3 sequence identifier: Q15751_C4811
  MOD_RES (15)..(15): May or may not be conjugated to a chemical probe
KVDRPYDSLPTSQTCFFQLRL

SEQ ID NO: 5934 - protein, 16 aa, Homo sapiens
  Table 3 sequence identifier: Q8N680_C296
  MOD_RES (7)..(7): May or may not be conjugated to a chemical probe
RVPLTLCSNAADLGKD

SEQ ID NO: 5935 - protein, 28 aa, Homo sapiens
  Table 3 sequence identifier: Q13371_C35
  MOD_RES (2)..(2): May or may not be conjugated to a chemical probe
RCAPASSSVPAEAELAGEGISVNTGPKG

SEQ ID NO: 5936 - protein, 34 aa, Homo sapiens
  Table 3 sequence identifier: Q9ULW3_C37
  MOD_RES (30)..(30): May or may not be conjugated to a chemical probe
KAATEQEPLEGTEQTLDAEEEQEESEEAACGSKK

SEQ ID NO: 5937 - protein, 19 aa, Homo sapiens
  Table 3 sequence identifier: O95602_C613
  MOD_RES (9)..(9): May or may not be conjugated to a chemical probe
RAEAYVLACTDQQYLVPKD

SEQ ID NO: 5938 - protein, 11 aa, Homo sapiens
  Table 3 sequence identifier: O95602_C1332
  MOD_RES (2)..(2): May or may not be conjugated to a chemical probe
KCLRPEDILRF

SEQ ID NO: 5939 - protein, 32 aa, Homo sapiens
  Table 3 sequence identifier: O94776_C44
  MOD_RES (4)..(4): May or may not be conjugated to a chemical probe
KVVCLFRRRDISSSLNSLADSNAREFEEESKQ

SEQ ID NO: 5940 - protein, 24 aa, Homo sapiens
  Table 3 sequence identifier: P61081_C111
  MOD_RES (18)..(18): May or may not be conjugated to a chemical probe
KCETMVYHPNIDLEGNVCLNILRE

SEQ ID NO: 5941 - protein, 43 aa, Homo sapiens
  Table 3 sequence identifier: P85037_C665
  MOD_RES (3)..(3): May or may not be conjugated to a chemical probe
RVCEVGPKEPAAAVAATATTTPATATTASASASSTGEPEVKRS

SEQ ID NO: 5942 - protein, 43 aa, Homo sapiens
  Table 3 sequence identifier: P62263_C31
  MOD_RES (23)..(23): May or may not be conjugated to a chemical probe
KKEEQVISLGPQVAEGENVFGVCHIFASFNDTFVHVTDLSGKE

SEQ ID NO: 5943 - protein, 17 aa, Homo sapiens
  Table 3 sequence identifier: Q08945_C200
  MOD_RES (13)..(13): May or may not be conjugated to a chemical probe
KADVIQATGDAICIFRE

SEQ ID NO: 5944 - protein, 10 aa, Homo sapiens
  Table 3 sequence identifier: Q9ULE6_C750
  MOD_RES (6)..(6): May or may not be conjugated to a chemical probe
REIIICTYRQ

SEQ ID NO: 5945 - protein, 35 aa, Homo sapiens
  Table 3 sequence identifier: Q96F07_C223
  MOD_RES (5)..(5): May or may not be conjugated to a chemical probe
RITQCLHQQLEVIPGYEELLADIVNICVDYYENKM

SEQ ID NO: 5946 - protein, 11 aa, Homo sapiens
  Table 3 sequence identifier: Q15329_C121
  MOD_RES (7)..(7): May or may not be conjugated to a chemical probe
KGVGAGCNTKE

SEQ ID NO: 5947 - protein, 20 aa, Homo sapiens
  Table 3 sequence identifier: O95163_C213
  MOD_RES (13)..(13): May or may not be conjugated to a chemical probe
RGDGQFFAVSVVCPETGARK

SEQ ID NO: 5948 - protein, 11 aa, Homo sapiens
  Table 3 sequence identifier: Q6NXT1_C265
  MOD_RES (8)..(8): May or may not be conjugated to a chemical probe
RERLDDLCTRL

SEQ ID NO: 5949 - protein, 19 aa, Homo sapiens
  Table 3 sequence identifier: Q96EY5_C90
  MOD_RES (12)..(12): May or may not be conjugated to a chemical probe
KSPLPLGFSPVCDPMDSKA

SEQ ID NO: 5950 - protein, 27 aa, Homo sapiens
  Table 3 sequence identifier: Q96CW6_C62
  MOD_RES (15)..(15): May or may not be conjugated to a chemical probe
RAAENNVFHLVATVCSQEEPVQPLLRE

SEQ ID NO: 5951 - protein, 15 aa, Homo sapiens
  Table 3 sequence identifier: Q7L1Q6_C349
  MOD_RES (6)..(6): May or may not be conjugated to a chemical probe
KIQEYCYDNIHFMKA

SEQ ID NO: 5952 - protein, 9 aa, Homo sapiens
  Table 3 sequence identifier: P15880_C188
  MOD_RES (2)..(2): May or may not be conjugated to a chemical probe
RCGSVLVRL

SEQ ID NO: 5953 - protein, 17 aa, Homo sapiens
  Table 3 sequence identifier: Q5VT52_C88
  MOD_RES (15)..(15): May or may not be conjugated to a chemical probe
RLNLFYLANDVIQNCKR

SEQ ID NO: 5954 - protein, 12 aa, Homo sapiens
  Table 3 sequence identifier: Q9BZI7_C319
  MOD_RES (7)..(7): May or may not be conjugated to a chemical probe
RASGQSCTLPKR

SEQ ID NO: 5955 - protein, 11 aa, Homo sapiens
  Table 3 sequence identifier: Q9Y6K9_C131
  MOD_RES (2)..(2): May or may not be conjugated to a chemical probe
RCQQQMAEDKA

SEQ ID NO: 5956 - protein, 13 aa, Homo sapiens
  Table 3 sequence identifier: P78527_C1507
  MOD_RES (11)..(11): May or may not be conjugated to a chemical probe
RQCLPSLDLSCKQ

SEQ ID NO: 5957 - protein, 20 aa, Homo sapiens
  Table 3 sequence identifier: P78527_C1791
  MOD_RES (4)..(4): May or may not be conjugated to a chemical probe
RGSCVTQVGLLESVYEMFRK

SEQ ID NO: 5958 - protein, 31 aa, Homo sapiens
  Table 3 sequence identifier: P78537_C61
  MOD_RES (9)..(9): May or may not be conjugated to a chemical probe
REAITAATCLTEALVDHLNVGVAQAYMNQRK

SEQ ID NO: 5959 - protein, 19 aa, Homo sapiens
  Table 3 sequence identifier: Q9Y6J0_C717
  MOD_RES (12)..(12): May or may not be conjugated to a chemical probe
KAVVHLLRPTLCTSGFDRA

SEQ ID NO: 5960 - protein, 17 aa, Homo sapiens
  Table 3 sequence identifier: Q15819_C69
  MOD_RES (4)..(4): May or may not be conjugated to a chemical probe
KVECGPKYPEAPPSVRF

SEQ ID NO: 5961 - protein, 27 aa, Homo sapiens
  Table 3 sequence identifier: P52564_C38
  MOD_RES (3)..(3): May or may not be conjugated to a chemical probe
KACISIGNQNFEVKADDLEPIMELGRG

SEQ ID NO: 5962 - protein, 30 aa, Homo sapiens
  Table 3 sequence identifier: Q8N556_C684
  MOD_RES (11)..(11): May or may not be conjugated to a chemical probe
RTLENSPISSCDTSDTEGPVPVNSAAVLKK

SEQ ID NO: 5963 - protein, 22 aa, Homo sapiens
  Table 3 sequence identifier: Q6P4F2_C151
  MOD_RES (4)..(4): May or may not be conjugated to a chemical probe
RLGCQIVLTPELEGAEFTLPKI

SEQ ID NO: 5964 - protein, 13 aa, Homo sapiens
  Table 3 sequence identifier: O43598_C117
  MOD_RES (4)..(4): May or may not be conjugated to a chemical probe
RILCLFRPQSGRV

SEQ ID NO: 5965 - protein, 14 aa, Homo sapiens
  Table 3 sequence identifier: P07996_C813
  MOD_RES (4)..(4): May or may not be conjugated to a chemical probe
RDNCQYVYNVDQRD

SEQ ID NO: 5966 - protein, 41 aa, Homo sapiens
  Table 3 sequence identifier: P07996_C946
  MOD_RES (28)..(28): May or may not be conjugated to a chemical probe
KDSDGDGRGDACKDDFDHDSVPDIDDICPENVDISETDFRR

SEQ ID NO: 5967 - protein, 30 aa, Homo sapiens
  Table 3 sequence identifier: P07996_C1167
  MOD_RES (27)..(27): May or may not be conjugated to a chemical probe
KTYAGGRLGLFVFSQEMVFFSDLKYECRDP

SEQ ID NO: 5968 - protein, 10 aa, Homo sapiens
  Table 3 sequence identifier: P41182_C175
  MOD_RES (6)..(6): May or may not be conjugated to a chemical probe
RSAPGCESRA

SEQ ID NO: 5969 - protein, 29 aa, Homo sapiens
  Table 3 sequence identifier: Q9BQC3_C251
  MOD_RES (16)..(16): May or may not be conjugated to a chemical probe
RLLLGWAPGQPFSSCCPDTGKTQDEGARA

SEQ ID NO: 5970 - protein, 23 aa, Homo sapiens
  Table 3 sequence identifier: O43572_C242
  MOD_RES (15)..(15): May or may not be conjugated to a chemical probe
RTNSTQNHLLLSQECDSAHSLRL

SEQ ID NO: 5971 - protein, 27 aa, Homo sapiens
  Table 3 sequence identifier: Q96RQ3_C129
  MOD_RES (12)..(12): May or may not be conjugated to a chemical probe
KTSAAQAIHPGCGFLSENMEFAELCKQ

SEQ ID NO: 5972 - protein, 15 aa, Homo sapiens
  Table 3 sequence identifier: Q96RQ3_C509
  MOD_RES (5)..(5): May or may not be conjugated to a chemical probe
KESLCQAALGLILKE

SEQ ID NO: 5973 - protein, 11 aa, Homo sapiens
  Table 3 sequence identifier: Q9ULV4_C23
  MOD_RES (5)..(5): May or may not be conjugated to a chemical probe
KNDQCYDDIRV

SEQ ID NO: 5974 - protein, 18 aa, Homo sapiens
  Table 3 sequence identifier: Q7Z6M1_C29
  MOD_RES (15)..(15): May or may not be conjugated to a chemical probe
KATWYTLTVPGDSPCARV

SEQ ID NO: 5975 - protein, 14 aa, Homo sapiens
  Table 3 sequence identifier: Q9NX38_C74
  MOD_RES (11)..(11): May or may not be conjugated to a chemical probe
KSISYQISTNCSRL

SEQ ID NO: 5976 - protein, 30 aa, Homo sapiens
  Table 3 sequence identifier: Q96HW7_C926
  MOD_RES (2)..(2): May or may not be conjugated to a chemical probe
KCPWMEGGEMSPQVETSIEGTIPFSKPVKV

SEQ ID NO: 5977 - protein, 28 aa, Homo sapiens
  Table 3 sequence identifier: Q9HCD6_C431
  MOD_RES (20)..(20): May or may not be conjugated to a chemical probe
RELPLTQPPSAHSSITSGSCPGTPEMRR

SEQ ID NO: 5978 - protein, 10 aa, Homo sapiens
  Table 3 sequence identifier: Q13418_C239
  MOD_RES (7)..(7): May or may not be conjugated to a chemical probe
RDFNEECPRL

SEQ ID NO: 5979 - protein, 10 aa, Homo sapiens
  Table 3 sequence identifier: P55036_C87
  MOD_RES (5)..(5): May or may not be conjugated to a chemical probe
KITFCTGIRV

SEQ ID NO: 5980 - protein, 9 aa, Homo sapiens
  Table 3 sequence identifier: P62072_C29
  MOD_RES (6)..(6): May or may not be conjugated to a chemical probe
RMTSACHRK

SEQ ID NO: 5981 - protein, 26 aa, Homo sapiens
  Table 3 sequence identifier: Q7Z2Z2_C474
  MOD_RES (23)..(23): May or may not be conjugated to a chemical probe
KLAAAQGQAPLEPTQDGSAIETCPKG

SEQ ID NO: 5982 - protein, 8 aa, Homo sapiens
  Table 3 sequence identifier: O00231_C257
  MOD_RES (6)..(6): May or may not be conjugated to a chemical probe
KYMLLCKI

SEQ ID NO: 5983 - protein, 20 aa, Homo sapiens
  Table 3 sequence identifier: P05023_C374
  MOD_RES (16)..(16): May or may not be conjugated to a chemical probe
KNLEAVETLGSTSTICSDKT

SEQ ID NO: 5984 - protein, 12 aa, Homo sapiens
  Table 3 sequence identifier: P45985_C379
  MOD_RES (7)..(7): May or may not be conjugated to a chemical probe
RAVEVACYVCKI

SEQ ID NO: 5985 - protein, 12 aa, Homo sapiens
  Table 3 sequence identifier: P17029_C63
  MOD_RES (3)..(3): May or may not be conjugated to a chemical probe
RFCYQNTFGPRE

SEQ ID NO: 5986 - protein, 23 aa, Homo sapiens
  Table 3 sequence identifier: Q9BSW2_C341
  MOD_RES (21)..(21): May or may not be conjugated to a chemical probe
RTSWELQDAQQQLESLQQEACKL

SEQ ID NO: 5987 - protein, 12 aa, Homo sapiens
  Table 3 sequence identifier: Q9P2R3_C34
  MOD_RES (2)..(2): May or may not be conjugated to a chemical probe
RCALLAAQANKE

SEQ ID NO: 5988 - protein, 24 aa, Homo sapiens
  Table 3 sequence identifier: Q9P2R3_C716
  MOD_RES (8)..(8): May or may not be conjugated to a chemical probe
RHGCDATCWGPGPGGCLQTLLHRA

SEQ ID NO: 5989 - protein, 13 aa, Homo sapiens
  Table 3 sequence identifier: P31040_C536
  MOD_RES (10)..(10): May or may not be conjugated to a chemical probe
RVGSVLQEGCGKI

SEQ ID NO: 5990 - protein, 17 aa, Homo sapiens
  Table 3 sequence identifier: P09104_C357
  MOD_RES (15)..(15): May or may not be conjugated to a chemical probe
KVNQIGSVTEAIQACKL

SEQ ID NO: 5991 - protein, 30 aa, Homo sapiens
  Table 3 sequence identifier: O76075_C108
  MOD_RES (22)..(22): May or may not be conjugated to a chemical probe
RFLSAFHEPQVGLIQAAQQLLCDEQAPQRQ

SEQ ID NO: 5992 - protein, 37 aa, Homo sapiens
  Table 3 sequence identifier: Q9P2D3_C1546
  MOD_RES (22)..(22): May or may not be conjugated to a chemical probe
RNSWAPILHAVALWLNSTGFTCSESTEAAAISGLQKR

SEQ ID NO: 5993 - protein, 41 aa, Homo sapiens
  Table 3 sequence identifier: Q9P2D6_C575
  MOD_RES (29)..(29): May or may not be conjugated to a chemical probe
KEGLDPTICGYNFDPKTYMRQTSQKEASCLPTNTERTEQKS

SEQ ID NO: 5994 - protein, 26 aa, Homo sapiens
  Table 3 sequence identifier: Q15334_C697
  MOD_RES (14)..(14): May or may not be conjugated to a chemical probe
KLQEANAQLAEQACPHDVEMTPVQRR

SEQ ID NO: 5995 - protein, 29 aa, Homo sapiens
  Table 3 sequence identifier: P17735_C332
  MOD_RES (27)..(27): May or may not be conjugated to a chemical probe
RDGLVKLSQRILGPCTIVQGALKSILCRT

SEQ ID NO: 5996 - protein, 26 aa, Homo sapiens
  Table 3 sequence identifier: Q9NXW9_C159
  MOD_RES (22)..(22): May or may not be conjugated to a chemical probe
RMGLYPGLEGFRPVEQCNLDYCPERG

SEQ ID NO: 5997 - protein, 46 aa, Homo sapiens
  Table 3 sequence identifier: Q5BKX5_C271
  MOD_RES (26)..(26): May or may not be conjugated to a chemical probe
RAVPSLGYTEDPELPGLFHPVLGTPCQPPSLPEEGSPGAVYLLSKQ

SEQ ID NO: 5998 - protein, 17 aa, Homo sapiens
  Table 3 sequence identifier: Q92888_C752
  MOD_RES (5)..(5): May or may not be conjugated to a chemical probe
RKNWCALITETAGSLKV

SEQ ID NO: 5999 - protein, 18 aa, Homo sapiens
  Table 3 sequence identifier: Q96EV8_C302
  MOD_RES (11)..(11): May or may not be conjugated to a chemical probe
RAKPPSSSSTCTDSATRD

SEQ ID NO: 6000 - protein, 10 aa, Homo sapiens
  Table 3 sequence identifier: A6NC98_C1382
  MOD_RES (7)..(7): May or may not be conjugated to a chemical probe
RAQSSLCLRD

SEQ ID NO: 6001 - protein, 18 aa, Homo sapiens
  Table 3 sequence identifier: Q9UQR0_C324
  MOD_RES (9)..(9): May or may not be conjugated to a chemical probe
KEKPLPVICSTSAASLKS

SEQ ID NO: 6002 - protein, 9 aa, Homo sapiens
  Table 3 sequence identifier: P04083_C263
  MOD_RES (2)..(2): May or may not be conjugated to a chemical probe
KCLTAIVKC

SEQ ID NO: 6003 - protein, 12 aa, Homo sapiens
  Table 3 sequence identifier: Q3V6T2_C1729
  MOD_RES (7)..(7): May or may not be conjugated to a chemical probe
KDKPVSCGLARS

SEQ ID NO: 6004 - protein, 25 aa, Homo sapiens
  Table 3 sequence identifier: Q12906_C278
  MOD_RES (5)..(5): May or may not be conjugated to a chemical probe
RVLECLASGIVMPDGSGIYDPCEKE

SEQ ID NO: 6005 - protein, 25 aa, Homo sapiens
  Table 3 sequence identifier: Q14315_C2555
  MOD_RES (3)..(3): May or may not be conjugated to a chemical probe
RECPEGHVVTYTPMAPGNYLIAIKY

SEQ ID NO: 6006 - protein, 11 aa, Homo sapiens
  Table 3 sequence identifier: Q14315_C2660
  MOD_RES (8)..(8): May or may not be conjugated to a chemical probe
KNSFTVDCSKA

SEQ ID NO: 6007 - protein, 23 aa, Homo sapiens
  Table 3 sequence identifier: O43813_C108
  MOD_RES (7)..(7): May or may not be conjugated to a chemical probe
RSITFLCGDAGPLAVAAVLYHKM

SEQ ID NO: 6008 - protein, 13 aa, Homo sapiens
  Table 3 sequence identifier: Q8IY67_C297
  MOD_RES (5)..(5): May or may not be conjugated to a chemical probe
RVSFCAPGPPGRS

SEQ ID NO: 6009 - protein, 20 aa, Homo sapiens
  Table 3 sequence identifier: O43818_C416
  MOD_RES (7)..(7): May or may not be conjugated to a chemical probe
RQLDLLCDIPLVGFINSLKF

SEQ ID NO: 6010 - protein, 43 aa, Homo sapiens
  Table 3 sequence identifier: Q9UI43_C126
  MOD_RES (34)..(34): May or may not be conjugated to a chemical probe
KVNAAGTDPSSPVGFVLGVDLLHIFPLEGATFLCPADVTDPRT

SEQ ID NO: 6011 - protein, 40 aa, Homo sapiens
  Table 3 sequence identifier: P04150_C287
  MOD_RES (30)..(30): May or may not be conjugated to a chemical probe
KDNGDLVLSSPSNVTLPQVKTEKEDFIELCTPGVIKQEKL

SEQ ID NO: 6012 - protein, 31 aa, Homo sapiens
  Table 3 sequence identifier: Q96JH7_C897
  MOD_RES (15)..(15): May or may not be conjugated to a chemical probe
KELQEQAEKEMYSLCLLATLMGEDVWSYAKG

SEQ ID NO: 6013 - protein, 12 aa, Homo sapiens
  Table 3 sequence identifier: Q9UJA5_C243
  MOD_RES (6)..(6): May or may not be conjugated to a chemical probe
RAATACFGFPKS

SEQ ID NO: 6014 - protein, 8 aa, Homo sapiens
  Table 3 sequence identifier: Q9UJA5_C492
  MOD_RES (3)..(3): May or may not be conjugated to a chemical probe
RKCPESDS

SEQ ID NO: 6015 - protein, 25 aa, Homo sapiens
  Table 3 sequence identifier: Q6PJG6_C820
  MOD_RES (24)..(24): May or may not be conjugated to a chemical probe
KSPQSLLQDMLATGGFLQGDEADCY

SEQ ID NO: 6016 - protein, 30 aa, Homo sapiens
  Table 3 sequence identifier: Q7LBC6_C509
  MOD_RES (21)..(21): May or may not be conjugated to a chemical probe
RSQSNGVLATENKPLGFSFGCSSAQEAQKD

SEQ ID NO: 6017 - protein, 17 aa, Homo sapiens
  Table 3 sequence identifier: P62140_C104
  MOD_RES (10)..(10): May or may not be conjugated to a chemical probe
RGKQSLETICLLLAYKI

SEQ ID NO: 6018 - protein, 14 aa, Homo sapiens
  Table 3 sequence identifier: P62140_C244
  MOD_RES (12)..(12): May or may not be conjugated to a chemical probe
KFLNRHDLDLICRA

SEQ ID NO: 6019 - protein, 39 aa, Homo sapiens
  Table 3 sequence identifier: Q5JPH6_C314
  MOD_RES (27)..(27): May or may not be conjugated to a chemical probe
RQGDVFLEHFAADGFLPDSLLDIITNCGSGFAENQMGRT

SEQ ID NO: 6020 - protein, 21 aa, Homo sapiens
  Table 3 sequence identifier: P12429_C246
  MOD_RES (18)..(18): May or may not be conjugated to a chemical probe
KGELSGHFEDLLLAIVNCVRN

SEQ ID NO: 6021 - protein, 18 aa, Homo sapiens
  Table 3 sequence identifier: Q5D0E6_C468
  MOD_RES (7)..(7): May or may not be conjugated to a chemical probe
RTAVLDCTAPGLHIAVRT

SEQ ID NO: 6022 - protein, 29 aa, Homo sapiens
  Table 3 sequence identifier: Q13315_C2991
  MOD_RES (26)..(26): May or may not be conjugated to a chemical probe
KALYLQQRPEDETELHPTLNADDQECKRN

SEQ ID NO: 6023 - protein, 25 aa, Homo sapiens
  Table 3 sequence identifier: P51116_C109
  MOD_RES (12)..(12): May or may not be conjugated to a chemical probe
KGDFYVIEYAACDATYNEIVTLERL

SEQ ID NO: 6024 - protein, 20 aa, Homo sapiens
  Table 3 sequence identifier: Q14683_C1210
  MOD_RES (15)..(15): May or may not be conjugated to a chemical probe
KAESLIGVYPEQGDCVISKV

SEQ ID NO: 6025 - protein, 44 aa, Homo sapiens
  Table 3 sequence identifier: P11766_C268
  MOD_RES (38)..(38): May or may not be conjugated to a chemical probe
RAKEFGATECINPQDFSKPIQEVLIEMTDGGVDYSFECIGNVKV

SEQ ID NO: 6026 - protein, 10 aa, Homo sapiens
  Table 3 sequence identifier: P11766_C282
  MOD_RES (7)..(7): May or may not be conjugated to a chemical probe
RAALEACHKG

SEQ ID NO: 6027 - protein, 38 aa, Homo sapiens
  Table 3 sequence identifier: Q8NI08_C302
  MOD_RES (15)..(15): May or may not be conjugated to a chemical probe
KIKDALPSDLPQDLCPLYRPGEWEDLASEKDINPFSKF

SEQ ID NO: 6028 - protein, 9 aa, Homo sapiens
  Table 3 sequence identifier: Q9HD64_C33
  MOD_RES (4)..(4): May or may not be conjugated to a chemical probe
RSQCATWKV

SEQ ID NO: 6029 - protein, 13 aa, Homo sapiens
  Table 3 sequence identifier: Q15796_C312
  MOD_RES (3)..(3): May or may not be conjugated to a chemical probe
RFCLGLLSNVNRN

SEQ ID NO: 6030 - protein, 26 aa, Homo sapiens
  Table 3 sequence identifier: Q9UBC1_C304
  MOD_RES (9)..(9): May or may not be conjugated to a chemical probe
RFGDVPWPCPGGGDPEAMAAALVARG

SEQ ID NO: 6031 - protein, 10 aa, Homo sapiens
  Table 3 sequence identifier: Q9HB65_C15
  MOD_RES (3)..(3): May or may not be conjugated to a chemical probe
RLCFTQAART

SEQ ID NO: 6032 - protein, 15 aa, Homo sapiens
  Table 3 sequence identifier: Q9HB65_C102
  MOD_RES (9)..(9): May or may not be conjugated to a chemical probe
RSGPNSLHCLGSLRE

SEQ ID NO: 6033 - protein, 17 aa, Homo sapiens
  Table 3 sequence identifier: Q9NUL3_C491
  MOD_RES (9)..(9): May or may not be conjugated to a chemical probe
KGSSPTPPCSPVQPSKQ

SEQ ID NO: 6034 - protein, 14 aa, Homo sapiens
  Table 3 sequence identifier: Q9BYI3_C300
  MOD_RES (2)..(2): May or may not be conjugated to a chemical probe
RCIQVEITPTSSRI

SEQ ID NO: 6035 - protein, 10 aa, Homo sapiens
  Table 3 sequence identifier: P51149_C143
  MOD_RES (6)..(6): May or may not be conjugated to a chemical probe
RAQAWCYSKN

SEQ ID NO: 6036 - protein, 34 aa, Homo sapiens
  Table 3 sequence identifier: P09110_C26
  MOD_RES (15)..(15): May or may not be conjugated to a chemical probe
RGPADSGWMPQAAPCLSGAPQASAADVVVVHGRR

SEQ ID NO: 6037 - protein, 13 aa, Homo sapiens
  Table 3 sequence identifier: Q9UL15_C360
  MOD_RES (5)..(5): May or may not be conjugated to a chemical probe
KLFACEEHPSHKA

SEQ ID NO: 6038 - protein, 15 aa, Homo sapiens
  Table 3 sequence identifier: P55263_C160
  MOD_RES (12)..(12): May or may not be conjugated to a chemical probe
RSLIANLAAANCYKK

SEQ ID NO: 6039 - protein, 24 aa, Homo sapiens
  Table 3 sequence identifier: Q9UL12_C799
  MOD_RES (22)..(22): May or may not be conjugated to a chemical probe
RHWHADLRPDDSPLEAGLAFTCKL

SEQ ID NO: 6040 - protein, 9 aa, Homo sapiens
  Table 3 sequence identifier: O15061_C1225
  MOD_RES (7)..(7): May or may not be conjugated to a chemical probe
RHSTFGCRQ

SEQ ID NO: 6041 - protein, 9 aa, Homo sapiens
  Table 3 sequence identifier: Q9NP64_C52
  MOD_RES (7)..(7): May or may not be conjugated to a chemical probe
RTHMSSCRV

SEQ ID NO: 6042 - protein, 12 aa, Homo sapiens
  Table 3 sequence identifier: Q96S59_C527
  MOD_RES (7)..(7): May or may not be conjugated to a chemical probe
KAHQSYCHSNKH

SEQ ID NO: 6043 - protein, 34 aa, Homo sapiens
  Table 3 sequence identifier: O15382_C195
  MOD_RES (9)..(9): May or may not be conjugated to a chemical probe
RALLFVILCPVGAYFPGGSVTPVSLLADPAFIRA

SEQ ID NO: 6044 - protein, 26 aa, Homo sapiens
  Table 3 sequence identifier: O15382_C345
  MOD_RES (21)..(21): May or may not be conjugated to a chemical probe
RALEEGRVREVFGSGTACQVCPVHRI

SEQ ID NO: 6045 - protein, 21 aa, Homo sapiens
  Table 3 sequence identifier: P45974_C838
  MOD_RES (3)..(3): May or may not be conjugated to a chemical probe
KVCASEKPPKDLGYIYFYQRV

SEQ ID NO: 6046 - protein, 19 aa, Homo sapiens
  Table 3 sequence identifier: O14497_C1874
  MOD_RES (13)..(13): May or may not be conjugated to a chemical probe
KTELLPSRPHAPCPPAPRK

SEQ ID NO: 6047 - protein, 17 aa, Homo sapiens
  Table 3 sequence identifier: O75521_C368
  MOD_RES (10)..(10): May or may not be conjugated to a chemical probe
KLHAVNAEECNVLQGRW

SEQ ID NO: 6048 - protein, 32 aa, Homo sapiens
  Table 3 sequence identifier: Q92769_C111
  MOD_RES (18)..(18): May or may not be conjugated to a chemical probe
RFNVGEDCPVFDGLFEFCQLSTGGSVAGAVKL

SEQ ID NO: 6049 - protein, 17 aa, Homo sapiens
  Table 3 sequence identifier: Q96AE4_C148
  MOD_RES (3)..(3): May or may not be conjugated to a chemical probe
RSCMLTGTPESVQSAKR

SEQ ID NO: 6050 - protein, 20 aa, Homo sapiens
  Table 3 sequence identifier: Q8NFI3_C454
  MOD_RES (5)..(5): May or may not be conjugated to a chemical probe
RTHCCLEDAWHGGSSLLVRG

SEQ ID NO: 6051 - protein, 19 aa, Homo sapiens
  Table 3 sequence identifier: Q9P107_C336
  MOD_RES (10)..(10): May or may not be conjugated to a chemical probe
RAFAALAECCAPFEPGQRY

SEQ ID NO: 6052 - protein, 18 aa, Homo sapiens
  Table 3 sequence identifier: Q01469_C47
  MOD_RES (14)..(14): May or may not be conjugated to a chemical probe
KMGAMAKPDCIITCDGKN

SEQ ID NO: 6053 - protein, 18 aa, Homo sapiens
  Table 3 sequence identifier: Q6PCE3_C303
  MOD_RES (2)..(2): May or may not be conjugated to a chemical probe
KCPNPEEGESVLELSLRL

SEQ ID NO: 6054 - protein, 14 aa, Homo sapiens
  Table 3 sequence identifier: Q9HAV0_C204
  MOD_RES (8)..(8): May or may not be conjugated to a chemical probe
RTFVSGACDASSKL

SEQ ID NO: 6055 - protein, 11 aa, Homo sapiens
  Table 3 sequence identifier: Q9Y3C8_C69
  MOD_RES (2)..(2): May or may not be conjugated to a chemical probe
KCWYIHDLLKY

SEQ ID NO: 6056 - protein, 25 aa, Homo sapiens
  Table 3 sequence identifier: Q8N806_C374
  MOD_RES (9)..(9): May or may not be conjugated to a chemical probe
RVQQVELICEYNDLKTELKDYLKRF

SEQ ID NO: 6057 - protein, 16 aa, Homo sapiens
  Table 3 sequence identifier: O43172_C299
  MOD_RES (8)..(8): May or may not be conjugated to a chemical probe
KDVNLASCAADGSVKL

SEQ ID NO: 6058 - protein, 13 aa, Homo sapiens
  Table 3 sequence identifier: O94851_C552
  MOD_RES (7)..(7): May or may not be conjugated to a chemical probe
RSGLALCAIIHRF

SEQ ID NO: 6059 - protein, 21 aa, Homo sapiens
  Table 3 sequence identifier: O60716_C692
  MOD_RES (17)..(17): May or may not be conjugated to a chemical probe
KTPAILEASAGAIQNLCAGRW

SEQ ID NO: 6060 - protein, 19 aa, Homo sapiens
  Table 3 sequence identifier: O94855_C1022
  MOD_RES (15)..(15): May or may not be conjugated to a chemical probe
KGLYGGSSYVDFLCCVHKE

SEQ ID NO: 6061 - protein, 19 aa, Homo sapiens
  Table 3 sequence identifier: Q9BQS8_C1062
  MOD_RES (4)..(4): May or may not be conjugated to a chemical probe
KLSCTSNHLAECQAAMLRK

SEQ ID NO: 6062 - protein, 10 aa, Homo sapiens
  Table 3 sequence identifier: Q9BSC4_C16
  MOD_RES (7)..(7): May or may not be conjugated to a chemical probe
KIYSLSCGKS

SEQ ID NO: 6063 - protein, 21 aa, Homo sapiens
  Table 3 sequence identifier: Q9H5X1_C90
  MOD_RES (9)..(9): May or may not be conjugated to a chemical probe
RFTPTVPHCSLATLIGLCLRV

SEQ ID NO: 6064 - protein, 21 aa, Homo sapiens
  Table 3 sequence identifier: Q13325_C429
  MOD_RES (3)..(3): May or may not be conjugated to a chemical probe
RLCHNALDVQSLSALGFVYKL

SEQ ID NO: 6065 - protein, 21 aa, Homo sapiens
  Table 3 sequence identifier: Q13325_C476
  MOD_RES (17)..(17): May or may not be conjugated to a chemical probe
KAQKIDPENAEFLTALCELRL

SEQ ID NO: 6066 - protein, 26 aa, Homo sapiens
  Table 3 sequence identifier: P23526_C228
  MOD_RES (15)..(15): May or may not be conjugated to a chemical probe
KVAVVAGYGDVGKGCAQALRGFGARV

SEQ ID NO: 6067 - protein, 16 aa, Homo sapiens
  Table 3 sequence identifier: Q9UG63_C586
  MOD_RES (13)..(13): May or may not be conjugated to a chemical probe
RLIQQVAQEIWVCEKQ

SEQ ID NO: 6068 - protein, 16 aa, Homo sapiens
  Table 3 sequence identifier: Q9BQA1_C26
  MOD_RES (12)..(12): May or may not be conjugated to a chemical probe
REWNLPPNAPACMERQ

SEQ ID NO: 6069 - protein, 29 aa, Homo sapiens
  Table 3 sequence identifier: Q9BQA1_C172
  MOD_RES (9)..(9): May or may not be conjugated to a chemical probe
RAHAAQVTCVAASPHKDSVFLSCSEDNRI

SEQ ID NO: 6070 - protein, 44 aa, Homo sapiens
  Table 3 sequence identifier: Q9BQA1_C208
  MOD_RES (8)..(8): May or may not be conjugated to a chemical probe
KPASQIGCSAPGYLPTSLAWHPQQSEVFVFGDENGTVSLVDTKS

SEQ ID NO: 6071 - protein, 19 aa, Homo sapiens
  Table 3 sequence identifier: Q9UKJ3_C569
  MOD_RES (10)..(10): May or may not be conjugated to a chemical probe
KAEPSISYSCNPLYFDFKL

SEQ ID NO: 6072 - protein, 23 aa, Homo sapiens
  Table 3 sequence identifier: Q15654_C47
  MOD_RES (5)..(5): May or may not be conjugated to a chemical probe
RVNFCPLPSEQCYQAPGGPEDRG

SEQ ID NO: 6073 - protein, 35 aa, Homo sapiens
  Table 3 sequence identifier: P36873_C202
  MOD_RES (15)..(15): May or may not be conjugated to a chemical probe
RIMRPTDVPDQGLLCDLLWSDPDKDVLGWGENDRG

SEQ ID NO: 6074 - protein, 34 aa, Homo sapiens
  Table 3 sequence identifier: Q8WXF1_C216
  MOD_RES (2)..(2): May or may not be conjugated to a chemical probe
RCGDGAFLLTTTPRPVIVEPMEQFDDEDGLPEKL

SEQ ID NO: 6075 - protein, 9 aa, Homo sapiens
  Table 3 sequence identifier: Q13555_C273
  MOD_RES (6)..(6): May or may not be conjugated to a chemical probe
KHPWVCQRS

SEQ ID NO: 6076 - protein, 14 aa, Homo sapiens
  Table 3 sequence identifier: P55265_C622
  MOD_RES (10)..(10): May or may not be conjugated to a chemical probe
KSPVTTLLECMHKL

SEQ ID NO: 6077 - protein, 14 aa, Homo sapiens
  Table 3 sequence identifier: P60900_C115
  MOD_RES (12)..(12): May or may not be conjugated to a chemical probe
KYGYEIPVDMLCKR

SEQ ID NO: 6078 - protein, 16 aa, Homo sapiens
  Table 3 sequence identifier: P50336_C183
  MOD_RES (3)..(3): May or may not be conjugated to a chemical probe
RSCFPSLFQAEQTHRS

SEQ ID NO: 6079 - protein, 23 aa, Homo sapiens
  Table 3 sequence identifier: Q63ZY3_C88
  MOD_RES (14)..(14): May or may not be conjugated to a chemical probe
RGPGSWWTSTESLCSNASGDSRH

SEQ ID NO: 6080 - protein, 14 aa, Homo sapiens
  Table 3 sequence identifier: Q9HB71_C173
  MOD_RES (12)..(12): May or may not be conjugated to a chemical probe
RWDYLTQVEKECKE

SEQ ID NO: 6081 - protein, 19 aa, Homo sapiens
  Table 3 sequence identifier: Q9P2T1_C224
  MOD_RES (12)..(12): May or may not be conjugated to a chemical probe
KGHIISDGGCSCPGDVAKA

SEQ ID NO: 6082 - protein, 14 aa, Homo sapiens
  Table 3 sequence identifier: Q5VIR6_C365
  MOD_RES (5)..(5): May or may not be conjugated to a chemical probe
RFSGCTLTDGTLKK

SEQ ID NO: 6083 - protein, 26 aa, Homo sapiens
  Table 3 sequence identifier: P51003_C677
  MOD_RES (13)..(13): May or may not be conjugated to a chemical probe
KTEEDETSEDANCLALSGHDKTEAKE

SEQ ID NO: 6084 - protein, 24 aa, Homo sapiens
  Table 3 sequence identifier: Q9NVE5_C50
  MOD_RES (7)..(7): May or may not be conjugated to a chemical probe
RNQGGTCYLNSLLQTLHFTPEFRE

SEQ ID NO: 6085 - protein, 10 aa, Homo sapiens
  Table 3 sequence identifier: Q9Y2Z2_C315
  MOD_RES (3)..(3): May or may not be conjugated to a chemical probe
RYCPSIESKV

SEQ ID NO: 6086 - protein, 30 aa, Homo sapiens
  Table 3 sequence identifier: P30042_C52
  MOD_RES (9)..(9): May or may not be conjugated to a chemical probe
RVALVLSGCGVYDGTEIHEASAILVHLSRG

SEQ ID NO: 6087 - protein, 38 aa, Homo sapiens
  Table 3 sequence identifier: Q96CX6_C170
  MOD_RES (28)..(28): May or may not be conjugated to a chemical probe
RALQTLSLGGNQLQSIPAEIENLQSLECLYLGGNFIKE

SEQ ID NO: 6088 - protein, 15 aa, Homo sapiens
  Table 3 sequence identifier: Q96CX2_C50
  MOD_RES (2)..(2): May or may not be conjugated to a chemical probe
RCTVVSVPDSLLWRM

SEQ ID NO: 6089 - protein, 23 aa, Homo sapiens
  Table 3 sequence identifier: P18887_C20
  MOD_RES (16)..(16): May or may not be conjugated to a chemical probe
RLRHVVSCSSQDSTHCAENLLKA

SEQ ID NO: 6090 - protein, 16 aa, Homo sapiens
  Table 3 sequence identifier: Q9C0C9_C1288
  MOD_RES (12)..(12): May or may not be conjugated to a chemical probe
RAALLEAGMPECTEDK

SEQ ID NO: 6091 - protein, 24 aa, Homo sapiens
  Table 3 sequence identifier: O00762_C114
  MOD_RES (18)..(18): May or may not be conjugated to a chemical probe
KFLTPCYHPNVDTQGNICLDILKE

SEQ ID NO: 6092 - protein, 9 aa, Homo sapiens
  Table 3 sequence identifier: Q9Y520_C481
  MOD_RES (5)..(5): May or may not be conjugated to a chemical probe
RKAACAEKL

SEQ ID NO: 6093 - protein, 36 aa, Homo sapiens
  Table 3 sequence identifier: Q9Y520_C953
  MOD_RES (2)..(2): May or may not be conjugated to a chemical probe
RCIDSKEPIERPEEKPKKEGFIRSSEGPKPEKVYKS

SEQ ID NO: 6094 - protein, 14 aa, Homo sapiens
  Table 3 sequence identifier: O75828_C227
  MOD_RES (8)..(8): May or may not be conjugated to a chemical probe
RILVNACCPGPVKT

SEQ ID NO: 6095 - protein, 15 aa, Homo sapiens
  Table 3 sequence identifier: O75534_C42
  MOD_RES (11)..(11): May or may not be conjugated to a chemical probe
KLLTSYGFIQCSERQ

SEQ ID NO: 6096 - protein, 14 aa, Homo sapiens
  Table 3 sequence identifier: P09651_C175
  MOD_RES (10)..(10): May or may not be conjugated to a chemical probe
KYHTVNGHNCEVRK

SEQ ID NO: 6097 - protein, 33 aa, Homo sapiens
  Table 3 sequence identifier: Q9H7T3_C143
  MOD_RES (26)..(26): May or may not be conjugated to a chemical probe
RPGGPALRPTPRPCAGPAPPPASRDCRCRRPRR

SEQ ID NO: 6098 - protein, 28 aa, Homo sapiens
  Table 3 sequence identifier: Q96R06_C382
  MOD_RES (13)..(13): May or may not be conjugated to a chemical probe
RDAAIGTTPFSTCSVGTWFTPSAPQEKS

SEQ ID NO: 6099 - protein, 9 aa, Homo sapiens
  Table 3 sequence identifier: O43837_C185
  MOD_RES (6)..(6): May or may not be conjugated to a chemical probe
RGVIECLKI

SEQ ID NO: 6100 - protein, 28 aa, Homo sapiens
  Table 3 sequence identifier: Q96AD5_C312
  MOD_RES (10)..(10): May or may not be conjugated to a chemical probe
RLNEALLEACVEPTDLLTTLSNMLPVRL

SEQ ID NO: 6101 - protein, 20 aa, Homo sapiens
  Table 3 sequence identifier: Q96BD8_C142
  MOD_RES (8)..(8): May or may not be conjugated to a chemical probe
KEMPFITCDEFNGVPSYMKS

SEQ ID NO: 6102 - protein, 14 aa, Homo sapiens
  Table 3 sequence identifier: Q8NFH4_C311
  MOD_RES (6)..(6): May or may not be conjugated to a chemical probe
RTLPLCVIGGDHKL

SEQ ID NO: 6103 - protein, 14 aa, Homo sapiens
  Table 3 sequence identifier: Q9NRA8_C767
  MOD_RES (4)..(4): May or may not be conjugated to a chemical probe
RSSCSTPLSQANRY

SEQ ID NO: 6104 - protein, 20 aa, Homo sapiens
  Table 3 sequence identifier: Q9NTM9_C248
  MOD_RES (13)..(13): May or may not be conjugated to a chemical probe
RNSSVAMGASLSCSEYSLKV

SEQ ID NO: 6105 - protein, 13 aa, Homo sapiens
  Table 3 sequence identifier: Q8TEU7_C1491
  MOD_RES (7)..(7): May or may not be conjugated to a chemical probe
KGLIVYCVTSPKK

SEQ ID NO: 6106 - protein, 29 aa, Homo sapiens
  Table 3 sequence identifier: Q14207_C842
  MOD_RES (25)..(25): May or may not be conjugated to a chemical probe
KSEDSAVNNTQNEDGIAFSANVTPCVSKD

SEQ ID NO: 6107 - protein, 20 aa, Homo sapiens
  Table 3 sequence identifier: Q14204_C1932
  MOD_RES (8)..(8): May or may not be conjugated to a chemical probe
RFVLVFNCDETFDFQAMGRI

SEQ ID NO: 6108 - protein, 22 aa, Homo sapiens
  Table 3 sequence identifier: Q14204_C4510
  MOD_RES (6)..(6): May or may not be conjugated to a chemical probe
KNIHVCLGGLFVPEAYITATRQ

SEQ ID NO: 6109 - protein, 29 aa, Homo sapiens
  Table 3 sequence identifier: O60684_C273
  MOD_RES (15)..(15): May or may not be conjugated to a chemical probe
RLLFSSDSDLLADACWALSYLSDGPNEKI

SEQ ID NO: 6110 - protein, 14 aa, Homo sapiens
  Table 3 sequence identifier: Q92841_C447
  MOD_RES (8)..(8): May or may not be conjugated to a chemical probe
RDGWPAMCIHGDKS

SEQ ID NO: 6111 - protein, 11 aa, Homo sapiens
  Table 3 sequence identifier: P07814_C1497
  MOD_RES (4)..(4): May or may not be conjugated to a chemical probe
KCVCGKNPAKY

SEQ ID NO: 6112 - protein, 11 aa, Homo sapiens
  Table 3 sequence identifier: P19174_C247
  MOD_RES (9)..(9): May or may not be conjugated to a chemical probe
RAGERPELCRV

SEQ ID NO: 6113 - protein, 9 aa, Homo sapiens
  Table 3 sequence identifier: P19174_C646
  MOD_RES (2)..(2): May or may not be conjugated to a chemical probe
RCNEFEMRL

SEQ ID NO: 6114 - protein, 19 aa, Homo sapiens
  Table 3 sequence identifier: P22102_C466
  MOD_RES (4)..(4): May or may not be conjugated to a chemical probe
RSGCKVDLGGFAGLFDLKA

SEQ ID NO: 6115 - protein, 19 aa, Homo sapiens
  Table 3 sequence identifier: O75643_C238
  MOD_RES (2)..(2): May or may not be conjugated to a chemical probe
RCTLSANLVASGELMSSKK

SEQ ID NO: 6116 - protein, 21 aa, Homo sapiens
  Table 3 sequence identifier: O75643_C576
  MOD_RES (19)..(19): May or may not be conjugated to a chemical probe
RLATYGITVAELTGDHQLCKE

SEQ ID NO: 6117 - protein, 30 aa, Homo sapiens
  Table 3 sequence identifier: Q04759_C17
  MOD_RES (12)..(12): May or may not be conjugated to a chemical probe
RIGLSNFDCGSCQSCQGEAVNPYCAVLVKE

SEQ ID NO: 6118 - protein, 41 aa, Homo sapiens
  Table 3 sequence identifier: O94992_C122
  MOD_RES (33)..(33): May or may not be conjugated to a chemical probe
KGQNGDDSSAGGDFPPPAEVEPTPEAELLAQPCHDSEASKL

SEQ ID NO: 6119 - protein, 12 aa, Homo sapiens
  Table 3 sequence identifier: P61106_C26
  MOD_RES (3)..(3): May or may not be conjugated to a chemical probe
KSCLLHQFTEKK

SEQ ID NO: 6120 - protein, 22 aa, Homo sapiens
  Table 3 sequence identifier: P50851_C982
  MOD_RES (6)..(6): May or may not be conjugated to a chemical probe
KDSPVCPHFTTNGNENSSIEKT

SEQ ID NO: 6121 - protein, 19 aa, Homo sapiens
  Table 3 sequence identifier: P50851_C1228
  MOD_RES (6)..(6): May or may not be conjugated to a chemical probe
KLINDCHGSVSEASSEQKI

SEQ ID NO: 6122 - protein, 10 aa, Homo sapiens
  Table 3 sequence identifier: Q6FI81_C237
  MOD_RES (5)..(5): May or may not be conjugated to a chemical probe
RAASCGEGKK

SEQ ID NO: 6123 - protein, 15 aa, Homo sapiens
  Table 3 sequence identifier: Q6FI81_C274
  MOD_RES (4)..(4): May or may not be conjugated to a chemical probe
KSACGNCYLGDAFRC

SEQ ID NO: 6124 - protein, 19 aa, Homo sapiens
  Table 3 sequence identifier: Q6FI81_C285
  MOD_RES (2)..(2): May or may not be conjugated to a chemical probe
RCASCPYLGMPAFKPGEKV

SEQ ID NO: 6125 - protein, 31 aa, Homo sapiens
  Table 3 sequence identifier: Q96RL1_C283
  MOD_RES (19)..(19): May or may not be conjugated to a chemical probe
KGLQDTGGTVNYFWGIPFCPDGVDPNQYTKV

SEQ ID NO: 6126 - protein, 9 aa, Homo sapiens
  Table 3 sequence identifier: O60264_C165
  MOD_RES (6)..(6): May or may not be conjugated to a chemical probe
KATNVCTRF

SEQ ID NO: 6127 - protein, 18 aa, Homo sapiens
  Table 3 sequence identifier: P11586_C152
  MOD_RES (3)..(3): May or may not be conjugated to a chemical probe
KGCLELIKETGVPIAGRH

SEQ ID NO: 6128 - protein, 12 aa, Homo sapiens
  Table 3 sequence identifier: Q86Y56_C138
  MOD_RES (7)..(7): May or may not be conjugated to a chemical probe
RRPPEACEELRL

SEQ ID NO: 6129 - protein, 11 aa, Homo sapiens
  Table 3 sequence identifier: Q15648_C681
  MOD_RES (5)..(5): May or may not be conjugated to a chemical probe
RMEICSGSNKT

SEQ ID NO: 6130 - protein, 27 aa, Homo sapiens
  Table 3 sequence identifier: Q6P4I2_C106
  MOD_RES (11)..(11): May or may not be conjugated to a chemical probe
RLLVTSGLPGCYLQVWQVAEDSDVIKA

SEQ ID NO: 6131 - protein, 23 aa, Homo sapiens
  Table 3 sequence identifier: P62318_C20
  MOD_RES (13)..(13): May or may not be conjugated to a chemical probe
KVLHEAEGHIVTCETNTGEVYRG

SEQ ID NO: 6132 - protein, 21 aa, Homo sapiens
  Table 3 sequence identifier: Q53HC9_C198
  MOD_RES (8)..(8): May or may not be conjugated to a chemical probe
RWSPHHNCTQVATANDTTLRG

SEQ ID NO: 6133 - protein, 29 aa, Homo sapiens
  Table 3 sequence identifier: Q9BRF8_C143
  MOD_RES (27)..(27): May or may not be conjugated to a chemical probe
RAIPLVLVSGNHDIGNTPTAETVEEFCRT

SEQ ID NO: 6134 - protein, 50 aa, Homo sapiens
  Table 3 sequence identifier: O95630_C221
  MOD_RES (35)..(35): May or may not be conjugated to a chemical probe
KVDPGLGGPLVPDLEKPSLDVFPTLTVSSIQPSDCHTTVRPAKPPVVDRS

SEQ ID NO: 6135 - protein, 14 aa, Homo sapiens
  Table 3 sequence identifier: P30101_C92
  MOD_RES (11)..(11): May or may not be conjugated to a chemical probe
KVDCTANTNTCNKY

SEQ ID NO: 6136 - protein, 33 aa, Homo sapiens
  Table 3 sequence identifier: P48200_C201
  MOD_RES (17)..(17): May or may not be conjugated to a chemical probe
RNSGTFSSQIENTPILCPFHLQPVPEPETVLKN

SEQ ID NO: 6137 - protein, 26 aa, Homo sapiens
  Table 3 sequence identifier: O14730_C22
  MOD_RES (2)..(2): May or may not be conjugated to a chemical probe
KCPWAIPQNTISCSLADVMSEQLAKE

SEQ ID NO: 6138 - protein, 44 aa, Homo sapiens
  Table 3 sequence identifier: P09884_C306
  MOD_RES (16)..(16): May or may not be conjugated to a chemical probe
KGTVSYLGSFLPDVSCWDIDQEGDSSFSVQEVQVDSSHLPLVKG

SEQ ID NO: 6139 - protein, 27 aa, Homo sapiens
  Table 3 sequence identifier: P09884_C1224
  MOD_RES (3)..(3): May or may not be conjugated to a chemical probe
RICEPIDGIDAVLIATWLGLDPTQFRV

SEQ ID NO: 6140 - protein, 8 aa, Homo sapiens
  Table 3 sequence identifier: P12034_C202
  MOD_RES (4)..(4): May or may not be conjugated to a chemical probe
KRGCSPRV

SEQ ID NO: 6141 - protein, 39 aa, Homo sapiens
  Table 3 sequence identifier: P10768_C243
  MOD_RES (35)..(35): May or may not be conjugated to a chemical probe
KSYPGSQLDILIDQGKDDQFLLDGQLLPDNFIAACTEKK

SEQ ID NO: 6142 - protein, 11 aa, Homo sapiens
  Table 3 sequence identifier: Q7L2E3_C1183
  MOD_RES (4)..(4): May or may not be conjugated to a chemical probe
RGPCGSFDVRK

SEQ ID NO: 6143 - protein, 29 aa, Homo sapiens
  Table 3 sequence identifier: Q9UJM3_C113
  MOD_RES (25)..(25): May or may not be conjugated to a chemical probe
KSSLPPLLIPPSENLGPHEEDQVVCGFKK

SEQ ID NO: 6144 - protein, 44 aa, Homo sapiens
  Table 3 sequence identifier: Q9UJM3_C204
  MOD_RES (3)..(3): May or may not be conjugated to a chemical probe
RGCGQINYAYFDTPAVSAADLSYVSDQNGGVPDPNPPPPQTHRR

SEQ ID NO: 6145 - protein, 8 aa, Homo sapiens
  Table 3 sequence identifier: Q8WTW3_C318
  MOD_RES (3)..(3): May or may not be conjugated to a chemical probe
KLCSWFKH

SEQ ID NO: 6146 - protein, 19 aa, Homo sapiens
  Table 3 sequence identifier: Q96KP1_C638
  MOD_RES (6)..(6): May or may not be conjugated to a chemical probe
KGVLECKPGEASVFQQPKT

SEQ ID NO: 6147 - protein, 14 aa, Homo sapiens
  Table 3 sequence identifier: P62136_C245
  MOD_RES (12)..(12): May or may not be conjugated to a chemical probe
KFLHKHDLDLICRA

SEQ ID NO: 6148 - protein, 17 aa, Homo sapiens
  Table 3 sequence identifier: Q9NQR4_C44
  MOD_RES (8)..(8): May or may not be conjugated to a chemical probe
KIVSLPECFNSPYGAKY

SEQ ID NO: 6149 - protein, 20 aa, Homo sapiens
  Table 3 sequence identifier: P52948_C1711
  MOD_RES (8)..(8): May or may not be conjugated to a chemical probe
RHIQQVDCSGNDLEQLHIKV

SEQ ID NO: 6150 - protein, 25 aa, Homo sapiens
  Table 3 sequence identifier: O15014_C178
  MOD_RES (8)..(8): May or may not be conjugated to a chemical probe
RSEGVGTCSEKDPGVLQPVPLGGRG

SEQ ID NO: 6151 - protein, 15 aa, Homo sapiens
  Table 3 sequence identifier: P13674_C167
  MOD_RES (9)..(9): May or may not be conjugated to a chemical probe
KSFLTAEDCFELGKV

SEQ ID NO: 6152 - protein, 18 aa, Homo sapiens
  Table 3 sequence identifier: O95232_C43
  MOD_RES (8)..(8): May or may not be conjugated to a chemical probe
KYYLCGFCPAELFTNTRS

SEQ ID NO: 6153 - protein, 11 aa, Homo sapiens
  Table 3 sequence identifier: Q96JM3_C119
  MOD_RES (4)..(4): May or may not be conjugated to a chemical probe
KIPCNSAEPKS

SEQ ID NO: 6154 - protein, 31 aa, Homo sapiens
  Table 3 sequence identifier: Q12857_C404
  MOD_RES (8)..(8): May or may not be conjugated to a chemical probe
KEFVQLVCPDAGQQAGQVGFLNPNGSSQGKV

SEQ ID NO: 6155 - protein, 18 aa, Homo sapiens
  Table 3 sequence identifier: O75818_C49
  MOD_RES (9)..(9): May or may not be conjugated to a chemical probe
RVSFLIPECGILSEELKN

SEQ ID NO: 6156 - protein, 26 aa, Homo sapiens
  Table 3 sequence identifier: Q8WYJ6_C102
  MOD_RES (19)..(19): May or may not be conjugated to a chemical probe
KLTLVDTPGFGDSVDCSDCWLPVVKF

SEQ ID NO: 6157 - protein, 22 aa, Homo sapiens
  Table 3 sequence identifier: O75815_C360
  MOD_RES (14)..(14): May or may not be conjugated to a chemical probe
KLPPQSSGVDTSPCPNSPVFRT

SEQ ID NO: 6158 - protein, 20 aa, Homo sapiens
  Table 3 sequence identifier: Q08J23_C235
  MOD_RES (6)..(6): May or may not be conjugated to a chemical probe
RLSSPCIMVVNHDASSIPRL

SEQ ID NO: 6159 - protein, 31 aa, Homo sapiens
  Table 3 sequence identifier: Q08J23_C758
  MOD_RES (22)..(22): May or may not be conjugated to a chemical probe
RAGEPNSPDAEEANSPDVTAGCDPAGVHPPR

SEQ ID NO: 6160 - protein, 16 aa, Homo sapiens
  Table 3 sequence identifier: Q9H2U1_C135
  MOD_RES (5)..(5): May or may not be conjugated to a chemical probe
KNTPCSENKLDIQEKK

SEQ ID NO: 6161 - protein, 36 aa, Homo sapiens
  Table 3 sequence identifier: Q86VQ1_C51
  MOD_RES (27)..(27): May or may not be conjugated to a chemical probe
RSAAGSPPAVAAAGSGNGAGGGGGVGCAPAAGAGRL

SEQ ID NO: 6162 - protein, 25 aa, Homo sapiens
  Table 3 sequence identifier: Q04695_C336
  MOD_RES (3)..(3): May or may not be conjugated to a chemical probe
RYCVQLSQIQGLIGSVEEQLAQLRC

SEQ ID NO: 6163 - protein, 15 aa, Homo sapiens
  Table 3 sequence identifier: Q9Y530_C33
  MOD_RES (8)..(8): May or may not be conjugated to a chemical probe
KTDSLAHCISEDCRM

SEQ ID NO: 6164 - protein, 9 aa, Homo sapiens
  Table 3 sequence identifier: Q9Y530_C122
  MOD_RES (4)..(4): May or may not be conjugated to a chemical probe
RIGCGLDRL

SEQ ID NO: 6165 - protein, 17 aa, Homo sapiens
  Table 3 sequence identifier: O43929_C16
  MOD_RES (10)..(10): May or may not be conjugated to a chemical probe
KSNSLIHTECLSQVQRI

SEQ ID NO: 6166 - protein, 9 aa, Homo sapiens
  Table 3 sequence identifier: Q66K14_C289
  MOD_RES (6)..(6): May or may not be conjugated to a chemical probe
RAKNECYRA

SEQ ID NO: 6167 - protein, 22 aa, Homo sapiens
  Table 3 sequence identifier: Q8N0W3_C484
  MOD_RES (16)..(16): May or may not be conjugated to a chemical probe
RAWDLWDPETLPAEYCLPSARL

SEQ ID NO: 6168 - protein, 28 aa, Homo sapiens
  Table 3 sequence identifier: Q8N0W3_C582
  MOD_RES (4)..(4): May or may not be conjugated to a chemical probe
REGCPGPLLATLDQVAAGAGDPGVAARA

SEQ ID NO: 6169 - protein, 11 aa, Homo sapiens
  Table 3 sequence identifier: P61812_C309
  MOD_RES (8)..(8): May or may not be conjugated to a chemical probe
RALDAAYCFRN

SEQ ID NO: 6170 - protein, 41 aa, Homo sapiens
  Table 3 sequence identifier: Q86X10_C923
  MOD_RES (30)..(30): May or may not be conjugated to a chemical probe
RVKDAAEATLTCIMQLLGAFPSPSGPASPCSLVNETTLIKY

SEQ ID NO: 6171 - protein, 21 aa, Homo sapiens
  Table 3 sequence identifier: O95833_C219
  MOD_RES (4)..(4): May or may not be conjugated to a chemical probe
KYTCPHSAEILAAYRPAVHPR

SEQ ID NO: 6172 - protein, 19 aa, Homo sapiens
  Table 3 sequence identifier: J3KR12_C95
  MOD_RES (7)..(7): May or may not be conjugated to a chemical probe
RHIVVSCAAGVTISSVEKK

SEQ ID NO: 6173 - protein, 43 aa, Homo sapiens
  Table 3 sequence identifier: P12931_C280
  MOD_RES (21)..(21): May or may not be conjugated to a chemical probe
KDAWEIPRESLRLEVKLGQGCFGEVWMGTWNGTTRVAIKTLKP

SEQ ID NO: 6174 - protein, 24 aa, Homo sapiens
  Table 3 sequence identifier: Q13535_C2336
  MOD_RES (3)..(3): May or may not be conjugated to a chemical probe
KDCRLMEFNSLINKCLRKDAESRR

SEQ ID NO: 6175 - protein, 18 aa, Homo sapiens
  Table 3 sequence identifier: Q6PIW4_C200
  MOD_RES (3)..(3): May or may not be conjugated to a chemical probe
RTCPTFSAPVGESATAKF

SEQ ID NO: 6176 - protein, 7 aa, Homo sapiens
  Table 3 sequence identifier: Q6PIW4_C672
  MOD_RES (5)..(5): May or may not be conjugated to a chemical probe
KTFGCGK

SEQ ID NO: 6177 - protein, 38 aa, Homo sapiens
  Table 3 sequence identifier: P31939_C575
  MOD_RES (24)..(24): May or may not be conjugated to a chemical probe
KRSGVAYIAAPSGSAADKVVIEACDELGIILAHTNLRL

SEQ ID NO: 6178 - protein, 14 aa, Homo sapiens
  Table 3 sequence identifier: Q15291_C212
  MOD_RES (5)..(5): May or may not be conjugated to a chemical probe
RKGSCFLINTADRI

SEQ ID NO: 6179 - protein, 10 aa, Homo sapiens
  Table 3 sequence identifier: O14618_C227
  MOD_RES (4)..(4): May or may not be conjugated to a chemical probe
RLACGIIARS

SEQ ID NO: 6180 - protein, 32 aa, Homo sapiens
  Table 3 sequence identifier: Q9BPW8_C106
  MOD_RES (10)..(10): May or may not be conjugated to a chemical probe
KLHLDEDYPCSLVGNWNTWYGEQDQAVHLWRF

SEQ ID NO: 6181 - protein, 16 aa, Homo sapiens
  Table 3 sequence identifier: Q9BPW8_C138
  MOD_RES (12)..(12): May or may not be conjugated to a chemical probe
RFSGGYPALMDCMNKL

SEQ ID NO: 6182 - protein, 21 aa, Homo sapiens
  Table 3 sequence identifier: Q8IUC6_C192
  MOD_RES (17)..(17): May or may not be conjugated to a chemical probe
RSLPRPIDGVSDWSQGCSLRS

SEQ ID NO: 6183 - protein, 20 aa, Homo sapiens
  Table 3 sequence identifier: Q9P0V3_C787
  MOD_RES (18)..(18): May or may not be conjugated to a chemical probe
RSFADALGYVNLPLTFFCRA

SEQ ID NO: 6184 - protein, 39 aa, Homo sapiens
  Table 3 sequence identifier: P52888_C18
  MOD_RES (18)..(18): May or may not be conjugated to a chemical probe
MKPPAACAGDMADAASPCSVVNDLRWDLSAQQIEERTRE

SEQ ID NO: 6185 - protein, 29 aa, Homo sapiens
  Table 3 sequence identifier: Q9H6T3_C519
  MOD_RES (22)..(22): May or may not be conjugated to a chemical probe
KIEEVSDTSSLQPQASLKQDVCQSYSEKM

SEQ ID NO: 6186 - protein, 23 aa, Homo sapiens
  Table 3 sequence identifier: Q07157_C1727
  MOD_RES (2)..(2): May or may not be conjugated to a chemical probe
KCLPGDPNYLVGANCVSVLIDHF

SEQ ID NO: 6187 - protein, 11 aa, Homo sapiens
  Table 3 sequence identifier: Q15061_C380
  MOD_RES (6)..(6): May or may not be conjugated to a chemical probe
RDISNCWAPKV

SEQ ID NO: 6188 - protein, 18 aa, Homo sapiens
  Table 3 sequence identifier: Q15067_C449
  MOD_RES (4)..(4): May or may not be conjugated to a chemical probe
KLVCGMVSYLNDLPSQRI

SEQ ID NO: 6189 - protein, 29 aa, Homo sapiens
  Table 3 sequence identifier: Q6P1X5_C1093
  MOD_RES (12)..(12): May or may not be conjugated to a chemical probe
RSALIPQHSAGCDSTPTTKPQWSLELARK

SEQ ID NO: 6190 - protein, 18 aa, Homo sapiens
  Table 3 sequence identifier: P67936_C154
  MOD_RES (2)..(2): May or may not be conjugated to a chemical probe
KCGDLEEELKNVTNNLKS

SEQ ID NO: 6191 - protein, 9 aa, Homo sapiens
  Table 3 sequence identifier: Q92918_C484
  MOD_RES (3)..(3): May or may not be conjugated to a chemical probe
KGCALLVKL

SEQ ID NO: 6192 - protein, 15 aa, Homo sapiens
  Table 3 sequence identifier: O15226_C37
  MOD_RES (6)..(6): May or may not be conjugated to a chemical probe
RHLSTCDGQNPPKKQ

SEQ ID NO: 6193 - protein, 26 aa, Homo sapiens
  Table 3 sequence identifier: Q9P2J5_C527
  MOD_RES (11)..(11): May or may not be conjugated to a chemical probe
RSSDECVVALCDQWYLDYGEENWKKQ

SEQ ID NO: 6194 - protein, 15 aa, Homo sapiens
  Table 3 sequence identifier: Q96GY3_C28
  MOD_RES (10)..(10): May or may not be conjugated to a chemical probe
RNQLDAVLQCLLEKS

SEQ ID NO: 6195 - protein, 21 aa, Homo sapiens
  Table 3 sequence identifier: Q96GY3_C176
  MOD_RES (19)..(19): May or may not be conjugated to a chemical probe
RDVYKLPPPTPPGPPGDACRS

SEQ ID NO: 6196 - protein, 19 aa, Homo sapiens
  Table 3 sequence identifier: Q8TF72_C1104
  MOD_RES (9)..(9): May or may not be conjugated to a chemical probe
KRPTSAAGCSLQEPGPLRE

SEQ ID NO: 6197 - protein, 30 aa, Homo sapiens
  Table 3 sequence identifier: Q8TF72_C1367
  MOD_RES (21)..(21): May or may not be conjugated to a chemical probe
RAAPLTPIGTPLPSAIPSGYCSQDGQTGRQ

SEQ ID NO: 6198 - protein, 14 aa, Homo sapiens
  Table 3 sequence identifier: P62906_C164
  MOD_RES (4)..(4): May or may not be conjugated to a chemical probe
KVLCLAVAVGHVKM

SEQ ID NO: 6199 - protein, 11 aa, Homo sapiens
  Table 3 sequence identifier: Q86VP6_C356
  MOD_RES (2)..(2): May or may not be conjugated to a chemical probe
KCLDAVVSTRH

SEQ ID NO: 6200 - protein, 36 aa, Homo sapiens
  Table 3 sequence identifier: Q92597_C49
  MOD_RES (31)..(31): May or may not be conjugated to a chemical probe
KGETITGLLQEFDVQEQDIETLHGSVHVTLCGTPKG

SEQ ID NO: 6201 - protein, 11 aa, Homo sapiens
  Table 3 sequence identifier: P35237_C370
  MOD_RES (8)..(8): May or may not be conjugated to a chemical probe
KTNGILFCGRF

SEQ ID NO: 6202 - protein, 25 aa, Homo sapiens
  Table 3 sequence identifier: P30876_C177
  MOD_RES (9)..(9): May or may not be conjugated to a chemical probe
RDLCELNECPLDPGGYFIINGSEKV

SEQ ID NO: 6203 - protein, 12 aa, Homo sapiens
  Table 3 sequence identifier: P30876_C622
  MOD_RES (3)..(3): May or may not be conjugated to a chemical probe
RICRPLLIVEKQ

SEQ ID NO: 6204 - protein, 9 aa, Homo sapiens
  Table 3 sequence identifier: P14324_C62
  MOD_RES (4)..(4): May or may not be conjugated to a chemical probe
RALCSSLRM

SEQ ID NO: 6205 - protein, 10 aa, Homo sapiens
  Table 3 sequence identifier: Q9Y3F4_C152
  MOD_RES (5)..(5): May or may not be conjugated to a chemical probe
KALWCSEDKQ

SEQ ID NO: 6206 - protein, 19 aa, Homo sapiens
  Table 3 sequence identifier: P27144_C22
  MOD_RES (16)..(16): May or may not be conjugated to a chemical probe
RAVILGPPGSGKGTVCQRI

SEQ ID NO: 6207 - protein, 18 aa, Homo sapiens
  Table 3 sequence identifier: Q14135_C167
  MOD_RES (11)..(11): May or may not be conjugated to a chemical probe
RQQNRPSVITCASAGARN

SEQ ID NO: 6208 - protein, 20 aa, Homo sapiens
  Table 3 sequence identifier: Q14135_C205
  MOD_RES (10)..(10): May or may not be conjugated to a chemical probe
RRPPSAATTCDPVVEEHFRR

SEQ ID NO: 6209 - protein, 14 aa, Homo sapiens
  Table 3 sequence identifier: O43143_C750
  MOD_RES (3)..(3): May or may not be conjugated to a chemical probe
RTCTDIKPEWLVKI

SEQ ID NO: 6210 - protein, 17 aa, Homo sapiens
  Table 3 sequence identifier: Q8IW35_C599
  MOD_RES (9)..(9): May or may not be conjugated to a chemical probe
RRMQEHIVCLTDEIRRL

SEQ ID NO: 6211 - protein, 39 aa, Homo sapiens
  Table 3 sequence identifier: P67775_C165
  MOD_RES (22)..(22): May or may not be conjugated to a chemical probe
KYFTDLFDYLPLTALVDGQIFCLHGGLSPSIDTLDHIRA

SEQ ID NO: 6212 - protein, 23 aa, Homo sapiens
  Table 3 sequence identifier: P67775_C196
  MOD_RES (12)..(12): May or may not be conjugated to a chemical probe
RLQEVPHEGPMCDLLWSDPDDRG

SEQ ID NO: 6213 - protein, 19 aa, Homo sapiens
  Table 3 sequence identifier: Q92667_C64
  MOD_RES (16)..(16): May or may not be conjugated to a chemical probe
RADPAIKEPLPVEDVCPKV

SEQ ID NO: 6214 - protein, 32 aa, Homo sapiens
  Table 3 sequence identifier: Q32MZ4_C726
  MOD_RES (8)..(8): May or may not be conjugated to a chemical probe
KSEDADRCTLPEHESPSQDISDACEAESTERC

SEQ ID NO: 6215 - protein, 14 aa, Homo sapiens
  Table 3 sequence identifier: Q32MZ4_C750
  MOD_RES (2)..(2): May or may not be conjugated to a chemical probe
RCEMSEHPSQTVRK

SEQ ID NO: 6216 - protein, 9 aa, Homo sapiens
  Table 3 sequence identifier: Q99615_C58
  MOD_RES (6)..(6): May or may not be conjugated to a chemical probe
KAIDMCPKN

SEQ ID NO: 6217 - protein, 12 aa, Homo sapiens
  Table 3 sequence identifier: Q99615_C175
  MOD_RES (9)..(9): May or may not be conjugated to a chemical probe
RALEFAPACHRF

SEQ ID NO: 6218 - protein, 14 aa, Homo sapiens
  Table 3 sequence identifier: Q99615_C225
  MOD_RES (10)..(10): May or may not be conjugated to a chemical probe
RGLCLYYEDCIEKA

SEQ ID NO: 6219 - protein, 20 aa, Homo sapiens
  Table 3 sequence identifier: Q05086_C198
  MOD_RES (4)..(4): May or may not be conjugated to a chemical probe
KAACSAAAMEEDSEASSSRI

SEQ ID NO: 6220 - protein, 15 aa, Homo sapiens
  Table 3 sequence identifier: Q52LW3_C1215
  MOD_RES (5)..(5): May or may not be conjugated to a chemical probe
KASACPGQATGQPKE

SEQ ID NO: 6221 - protein, 21 aa, Homo sapiens
  Table 3 sequence identifier: Q52LW3_C1239
  MOD_RES (16)..(16): May or may not be conjugated to a chemical probe
KEDSEELGLPDVNPMCQRPRL

SEQ ID NO: 6222 - protein, 10 aa, Homo sapiens
  Table 3 sequence identifier: Q9UNS1_C700
  MOD_RES (4)..(4): May or may not be conjugated to a chemical probe
RFACSTVVRA

SEQ ID NO: 6223 - protein, 12 aa, Homo sapiens
  Table 3 sequence identifier: O94885_C1120
  MOD_RES (2)..(2): May or may not be conjugated to a chemical probe
RCGIPEALVQRY

SEQ ID NO: 6224 - protein, 27 aa, Homo sapiens
  Table 3 sequence identifier: P10619_C281
  MOD_RES (17)..(17): May or may not be conjugated to a chemical probe
RIVGNSGLNIYNLYAPCAGGVPSHFRY

SEQ ID NO: 6225 - protein, 16 aa, Homo sapiens
  Table 3 sequence identifier: Q9UHQ1_C192
  MOD_RES (12)..(12): May or may not be conjugated to a chemical probe
RVLGRPITAHLCTAKS

SEQ ID NO: 6226 - protein, 18 aa, Homo sapiens
  Table 3 sequence identifier: Q9P2N6_C459
  MOD_RES (2)..(2): May or may not be conjugated to a chemical probe
RCIQDEIVDFLTGVLTRA

SEQ ID NO: 6227 - protein, 14 aa, Homo sapiens
  Table 3 sequence identifier: Q9ULC5_C322
  MOD_RES (10)..(10): May or may not be conjugated to a chemical probe
RIVQAVVYSCGARV

SEQ ID NO: 6228 - protein, 14 aa, Homo sapiens
  Table 3 sequence identifier: O75116_C428
  MOD_RES (12)..(12): May or may not be conjugated to a chemical probe
RENLLLSDSPSCRE

SEQ ID NO: 6229 - protein, 20 aa, Homo sapiens
  Table 3 sequence identifier: P62330_C90
  MOD_RES (16)..(16): May or may not be conjugated to a chemical probe
RHYYTGTQGLIFVVDCADRD

SEQ ID NO: 6230 - protein, 25 aa, Homo sapiens
  Table 3 sequence identifier: Q96G74_C434
  MOD_RES (7)..(7): May or may not be conjugated to a chemical probe
RKASATCSSATAAASSGLEEWTSRS

SEQ ID NO: 6231 - protein, 13 aa, Homo sapiens
  Table 3 sequence identifier: Q13444_C667
  MOD_RES (8)..(8): May or may not be conjugated to a chemical probe
KCHGHGVCDSNRH

SEQ ID NO: 6232 - protein, 18 aa, Homo sapiens
  Table 3 sequence identifier: Q5UIP0_C1904
  MOD_RES (16)..(16): May or may not be conjugated to a chemical probe
KMELSLENVTVEGNACKV

SEQ ID NO: 6233 - protein, 20 aa, Homo sapiens
  Table 3 sequence identifier: Q9NZB2_C919
  MOD_RES (9)..(9): May or may not be conjugated to a chemical probe
RVAAASGHCGAFSGSDSSRT

SEQ ID NO: 6234 - protein, 12 aa, Homo sapiens
  Table 3 sequence identifier: O94805_C32
  MOD_RES (9)..(9): May or may not be conjugated to a chemical probe
RAGYAGEDCPKA

SEQ ID NO: 6235 - protein, 14 aa, Homo sapiens
  Table 3 sequence identifier: Q9UDY8_C71
  MOD_RES (4)..(4): May or may not be conjugated to a chemical probe
RLSCLDLEQCSLKV

SEQ ID NO: 6236 - protein, 36 aa, Homo sapiens
  Table 3 sequence identifier: P06400_C590
  MOD_RES (14)..(14): May or may not be conjugated to a chemical probe
KDREGPTDHLESACPLNLPLQNNHTAADMYLSPVRS

SEQ ID NO: 6237 - protein, 23 aa, Homo sapiens
  Table 3 sequence identifier: P55199_C433
  MOD_RES (10)..(10): May or may not be conjugated to a chemical probe
RLGLPLLTDCAQPSRPHGSPSRS

SEQ ID NO: 6238 - protein, 47 aa, Homo sapiens
  Table 3 sequence identifier: P55199_C494
  MOD_RES (28)..(28): May or may not be conjugated to a chemical probe
RAQLPDCAPATHATPGAPADTPGLNGTCSVSSVPTSTSETPDYLLKY

SEQ ID NO: 6239 - protein, 13 aa, Homo sapiens
  Table 3 sequence identifier: Q96KR1_C525
  MOD_RES (10)..(10): May or may not be conjugated to a chemical probe
KAEDIKGTECVKS

SEQ ID NO: 6240 - protein, 10 aa, Homo sapiens
  Table 3 sequence identifier: Q9H0K6_C640
  MOD_RES (7)..(7): May or may not be conjugated to a chemical probe
KLNIPGCYRQ

SEQ ID NO: 6241 - protein, 16 aa, Homo sapiens
  Table 3 sequence identifier: Q96K76_C856
  MOD_RES (13)..(13): May or may not be conjugated to a chemical probe
KAGGDSGNVDDDCERV

SEQ ID NO: 6242 - protein, 20 aa, Homo sapiens
  Table 3 sequence identifier: O14727_C115
  MOD_RES (5)..(5): May or may not be conjugated to a chemical probe
RTVLCEGGVPQRPVVFVTRK

SEQ ID NO: 6243 - protein, 21 aa, Homo sapiens
  Table 3 sequence identifier: Q96N21_C52
  MOD_RES (12)..(12): May or may not be conjugated to a chemical probe
KISHESPGSSQCLLEYLLSRL

SEQ ID NO: 6244 - protein, 14 aa, Homo sapiens
  Table 3 sequence identifier: Q9HC38_C171
  MOD_RES (7)..(7): May or may not be conjugated to a chemical probe
KSLNYWCNLLGMKI

SEQ ID NO: 6245 - protein, 10 aa, Homo sapiens
  Table 3 sequence identifier: Q9HC38_C221
  MOD_RES (6)..(6): May or may not be conjugated to a chemical probe
RIAFSCPQKE

SEQ ID NO: 6246 - protein, 20 aa, Homo sapiens
  Table 3 sequence identifier: Q9NSD9_C76
  MOD_RES (13)..(13): May or may not be conjugated to a chemical probe
KIDVPANRYDLLCLEGLVRG

SEQ ID NO: 6247 - protein, 16 aa, Homo sapiens
  Table 3 sequence identifier: O75376_C1274
  MOD_RES (14)..(14): May or may not be conjugated to a chemical probe
RESPVSAPLEGLICRA

SEQ ID NO: 6248 - protein, 19 aa, Homo sapiens
  Table 3 sequence identifier: O75376_C2322
  MOD_RES (15)..(15): May or may not be conjugated to a chemical probe
RREEGDPSPHSGGVCKPKL

SEQ ID NO: 6249 - protein, 9 aa, Homo sapiens
  Table 3 sequence identifier: Q15058_C291
  MOD_RES (2)..(2): May or may not be conjugated to a chemical probe
KCSLPQLKS

SEQ ID NO: 6250 - protein, 17 aa, Homo sapiens
  Table 3 sequence identifier: Q15050_C52
  MOD_RES (2)..(2): May or may not be conjugated to a chemical probe
RCAGPTPEAELQALARD

SEQ ID NO: 6251 - protein, 23 aa, Homo sapiens
  Table 3 sequence identifier: Q15052_C667
  MOD_RES (7)..(7): May or may not be conjugated to a chemical probe
KVIEAYCTSANFQQGHGSSTRKD

SEQ ID NO: 6252 - protein, 14 aa, Homo sapiens
  Table 3 sequence identifier: O00592_C344
  MOD_RES (2)..(2): May or may not be conjugated to a chemical probe
KCEDLETQTQSEKQ

SEQ ID NO: 6253 - protein, 28 aa, Homo sapiens
  Table 3 sequence identifier: P49903_C317
  MOD_RES (14)..(14): May or may not be conjugated to a chemical probe
KACGNMFGLMHGTCPETSGGLLICLPRE

SEQ ID NO: 6254 - protein, 13 aa, Homo sapiens
  Table 3 sequence identifier: E7EVH7_C562
  MOD_RES (9)..(9): May or may not be conjugated to a chemical probe
KTKNNLASCYLKQ

SEQ ID NO: 6255 - protein, 22 aa, Homo sapiens
  Table 3 sequence identifier: Q9Y6A5_C242
  MOD_RES (6)..(6): May or may not be conjugated to a chemical probe
RHGGVCAPAAVATSPPGAIPKE

SEQ ID NO: 6256 - protein, 11 aa, Homo sapiens
  Table 3 sequence identifier: Q6P1K8_C299
  MOD_RES (3)..(3): May or may not be conjugated to a chemical probe
KYCELPVECKI

SEQ ID NO: 6257 - protein, 22 aa, Homo sapiens
  Table 3 sequence identifier: Q3B7T1_C589
  MOD_RES (10)..(10): May or may not be conjugated to a chemical probe
KSIHQIRPSCAFPVCHDTEERC

SEQ ID NO: 6258 - protein, 44 aa, Homo sapiens
  Table 3 sequence identifier: Q9H0W8_C411
  MOD_RES (9)..(9): May or may not be conjugated to a chemical probe
KGTLSMLQCNVFPGLPPDFLDSEVNLFLVPFMDSEAESENPPRA

SEQ ID NO: 6259 - protein, 24 aa, Homo sapiens
  Table 3 sequence identifier: Q86XP3_C281
  MOD_RES (13)..(13): May or may not be conjugated to a chemical probe
RKSEYTQPTPIQCQGVPVALSGRD

SEQ ID NO: 6260 - protein, 16 aa, Homo sapiens
  Table 3 sequence identifier: Q08257_C45
  MOD_RES (5)..(5): May or may not be conjugated to a chemical probe
KVHACGVNPVETYIRS

SEQ ID NO: 6261 - protein, 19 aa, Homo sapiens
  Table 3 sequence identifier: O75879_C170
  MOD_RES (15)..(15): May or may not be conjugated to a chemical probe
RLPIAVNGSLIYGVCAGKK

SEQ ID NO: 6262 - protein, 9 aa, Homo sapiens
  Table 3 sequence identifier: Q92696_C354
  MOD_RES (2)..(2): May or may not be conjugated to a chemical probe
RCELSVEKS

SEQ ID NO: 6263 - protein, 32 aa, Homo sapiens
  Table 3 sequence identifier: Q15772_C1052
  MOD_RES (28)..(28): May or may not be conjugated to a chemical probe
KLLLTSVHEDDSGVYTCKLSTAKDELTCSARL

SEQ ID NO: 6264 - protein, 35 aa, Homo sapiens
  Table 3 sequence identifier: O75616_C348
  MOD_RES (29)..(29): May or may not be conjugated to a chemical probe
KQYLLTQAQPGPWEYHSAVLTSQTPEEICANIIRE

SEQ ID NO: 6265 - protein, 41 aa, Homo sapiens
  Table 3 sequence identifier: Q6UB35_C291
  MOD_RES (32)..(32): May or may not be conjugated to a chemical probe
KLHEADIVVLGSPKPEEIPLTWIQPGTTVLNCSHDFLSGKV

SEQ ID NO: 6266 - protein, 20 aa, Homo sapiens
  Table 3 sequence identifier: Q8N392_C323
  MOD_RES (7)..(7): May or may not be conjugated to a chemical probe
KDSGLFCVPLTALLEQDQRK

SEQ ID NO: 6267 - protein, 18 aa, Homo sapiens
  Table 3 sequence identifier: Q9UHR6_C188
  MOD_RES (10)..(10): May or may not be conjugated to a chemical probe
RVLGDVPGACTPVVPTRI

SEQ ID NO: 6268 - protein, 12 aa, Homo sapiens
  Table 3 sequence identifier: P57081_C95
  MOD_RES (7)..(7): May or may not be conjugated to a chemical probe
RTKPWQCLSVRT

SEQ ID NO: 6269 - protein, 45 aa, Homo sapiens
  Table 3 sequence identifier: Q9H4L4_C274
  MOD_RES (16)..(16): May or may not be conjugated to a chemical probe
RSLAPPDASILISNVCSIGDHVAQELFQGSDLGMAEEAERPGEKA

SEQ ID NO: 6270 - protein, 21 aa, Homo sapiens
  Table 3 sequence identifier: Q14149_C632
  MOD_RES (2)..(2): May or may not be conjugated to a chemical probe
RCDQGNTAATQTEVPSLVVKK

SEQ ID NO: 6271 - protein, 24 aa, Homo sapiens
  Table 3 sequence identifier: O95455_C175
  MOD_RES (6)..(6): May or may not be conjugated to a chemical probe
KAAAECFVQSYWEQYKFPVVITRS

SEQ ID NO: 6272 - protein, 13 aa, Homo sapiens
  Table 3 sequence identifier: O95453_C169
  MOD_RES (2)..(2): May or may not be conjugated to a chemical probe
KCPVTIPEDQKKF

SEQ ID NO: 6273 - protein, 9 aa, Homo sapiens
  Table 3 sequence identifier: Q99426_C216
  MOD_RES (5)..(5): May or may not be conjugated to a chemical probe
RYFECQAKY

SEQ ID NO: 6274 - protein, 17 aa, Homo sapiens
  Table 3 sequence identifier: Q16566_C202
  MOD_RES (4)..(4): May or may not be conjugated to a chemical probe
KTVCGTPGYCAPEILRG

SEQ ID NO: 6275 - protein, 33 aa, Homo sapiens
  Table 3 sequence identifier: Q9Y5P6_C113
  MOD_RES (20)..(20): May or may not be conjugated to a chemical probe
RDLLSETADPFFVLNSDVICDFPFQAMVQFHRH

SEQ ID NO: 6276 - protein, 17 aa, Homo sapiens
  Table 3 sequence identifier: Q9UBT2_C158
  MOD_RES (6)..(6): May or may not be conjugated to a chemical probe
KGVTECYECHPKPTQRT

SEQ ID NO: 6277 - protein, 15 aa, Homo sapiens
  Table 3 sequence identifier: Q96C36_C225
  MOD_RES (11)..(11): May or may not be conjugated to a chemical probe
KMLLDSEQHPCQLKD

SEQ ID NO: 6278 - protein, 19 aa, Homo sapiens
  Table 3 sequence identifier: Q6NS38_C192
  MOD_RES (17)..(17): May or may not be conjugated to a chemical probe
RELAPGSPIASVSFGACRD

SEQ ID NO: 6279 - protein, 20 aa, Homo sapiens
  Table 3 sequence identifier: Q86SQ0_C385
  MOD_RES (5)..(5): May or may not be conjugated to a chemical probe
RNFSCGSVEFDEADLESLRQ

SEQ ID NO: 6280 - protein, 20 aa, Homo sapiens
  Table 3 sequence identifier: Q6DKI1_C184
  MOD_RES (6)..(6): May or may not be conjugated to a chemical probe
KFGVICLEDLIHEIAFPGKH

SEQ ID NO: 6281 - protein, 19 aa, Homo sapiens
  Table 3 sequence identifier: Q06203_C503
  MOD_RES (5)..(5): May or may not be conjugated to a chemical probe
KSGHCTACLTGKYPVELEW

SEQ ID NO: 6282 - protein, 44 aa, Homo sapiens
  Table 3 sequence identifier: Q7Z6I6_C965
  MOD_RES (18)..(18): May or may not be conjugated to a chemical probe
KMPSAMCSKIHVAPANPCPRPGRLDGTPGERAWGSRASRSSWRN

SEQ ID NO: 6283 - protein, 15 aa, Homo sapiens
  Table 3 sequence identifier: Q9ULP9_C223
  MOD_RES (10)..(10): May or may not be conjugated to a chemical probe
RWLFGELPLCYFARV

SEQ ID NO: 6284 - protein, 10 aa, Homo sapiens
  Table 3 sequence identifier: P34897_C343
  MOD_RES (4)..(4): May or may not be conjugated to a chemical probe
KQACTPMFRE

SEQ ID NO: 6285 - protein, 21 aa, Homo sapiens
  Table 3 sequence identifier: P49736_C315
  MOD_RES (9)..(9): May or may not be conjugated to a chemical probe
RTSGVVTSCTGVLPQLSMVKY

SEQ ID NO: 6286 - protein, 11 aa, Homo sapiens
  Table 3 sequence identifier: O95071_C2094
  MOD_RES (3)..(3): May or may not be conjugated to a chemical probe
RNCLEVLPTKM

SEQ ID NO: 6287 - protein, 41 aa, Homo sapiens
  Table 3 sequence identifier: O95071_C2173
  MOD_RES (25)..(25): May or may not be conjugated to a chemical probe
KSSLLAEIGLTESEGPPLTSFRPQCSFMGMVISHDMLLGRW

SEQ ID NO: 6288 - protein, 29 aa, Homo sapiens
  Table 3 sequence identifier: Q96L91_C162
  MOD_RES (12)..(12): May or may not be conjugated to a chemical probe
RAGAPGPGLGLCSSSPTGGFVDASVLVRQ

SEQ ID NO: 6289 - protein, 14 aa, Homo sapiens
  Table 3 sequence identifier: Q6XZF7_C1434
  MOD_RES (2)..(2): May or may not be conjugated to a chemical probe
RCPSDPDSTSQPRS

SEQ ID NO: 6290 - protein, 17 aa, Homo sapiens
  Table 3 sequence identifier: P34949_C11
  MOD_RES (7)..(7): May or may not be conjugated to a chemical probe
RVFPLSCAVQQYAWGKM

SEQ ID NO: 6291 - protein, 16 aa, Homo sapiens
  Table 3 sequence identifier: Q15437_C180
  MOD_RES (10)..(10): May or may not be conjugated to a chemical probe
RMVQVHELSCEGISKS

SEQ ID NO: 6292 - protein, 8 aa, Homo sapiens
  Table 3 sequence identifier: P09960_C543
  MOD_RES (3)..(3): May or may not be conjugated to a chemical probe
RLCIQSKW

SEQ ID NO: 6293 - protein, 23 aa, Homo sapiens
  Table 3 sequence identifier: P30460_C349
  MOD_RES (10)..(10): May or may not be conjugated to a chemical probe
KGGSYSQAACSDSAQGSDVSLTA

SEQ ID NO: 6294 - protein, 29 aa, Homo sapiens
  Table 3 sequence identifier: Q9BVS4_C449
  MOD_RES (17)..(17): May or may not be conjugated to a chemical probe
RVQGGVPAGSDEYEDECPHLIALSSLNRE

SEQ ID NO: 6295 - protein, 11 aa, Homo sapiens
  Table 3 sequence identifier: O15027_C1273
  MOD_RES (8)..(8): May or may not be conjugated to a chemical probe
KFSVPHVCARF

SEQ ID NO: 6296 - protein, 26 aa, Homo sapiens
  Table 3 sequence identifier: O15027_C1619
  MOD_RES (16)..(16): May or may not be conjugated to a chemical probe
RTEAYEYAQSLGAETCPLPSFQVFKF

SEQ ID NO: 6297 - protein, 11 aa, Homo sapiens
  Table 3 sequence identifier: Q9NQW7_C279
  MOD_RES (4)..(4): May or may not be conjugated to a chemical probe
KALCADLSPRE

SEQ ID NO: 6298 - protein, 11 aa, Homo sapiens
  Table 3 sequence identifier: Q96EB6_C380
  MOD_RES (6)..(6): May or may not be conjugated to a chemical probe
KYKVDCEAVRG

SEQ ID NO: 6299 - protein, 38 aa, Homo sapiens
  Table 3 sequence identifier: P10398_C514
  MOD_RES (36)..(36): May or may not be conjugated to a chemical probe
RMQDPNPYSFQSDVYAYGVVLYELMTGSLPYSHIGCRD

SEQ ID NO: 6300 - protein, 30 aa, Homo sapiens
  Table 3 sequence identifier: Q15046_C456
  MOD_RES (11)..(11): May or may not be conjugated to a chemical probe
KLVGEFLEVTCINPTFICDHPQIMSPLAKW

SEQ ID NO: 6301 - protein, 36 aa, Homo sapiens
  Table 3 sequence identifier: Q15046_C534
  MOD_RES (16)..(16): May or may not be conjugated to a chemical probe
KAAGDDEAMFIDENFCTALEYGLPPTAGWGMGIDRV

SEQ ID NO: 6302 - protein, 33 aa, Homo sapiens
  Table 3 sequence identifier: Q12802_C1548
  MOD_RES (28)..(28): May or may not be conjugated to a chemical probe
RESESEPADPGDVEEEEMDSITEVPANCSVLRS

SEQ ID NO: 6303 - protein, 15 aa, Homo sapiens
  Table 3 sequence identifier: Q12802_C2101
  MOD_RES (3)..(3): May or may not be conjugated to a chemical probe
KFCGQHNQSVNYFKD

SEQ ID NO: 6304 - protein, 22 aa, Homo sapiens
  Table 3 sequence identifier: Q9H7B4_C421
  MOD_RES (16)..(16): May or may not be conjugated to a chemical probe
REHSLIEDLILLLEECDANIRA

SEQ ID NO: 6305 - protein, 28 aa, Homo sapiens
  Table 3 sequence identifier: Q13867_C40
  MOD_RES (24)..(24): May or may not be conjugated to a chemical probe
KLNSDPQFVLAQNVGTTHDLLDICLKRA

SEQ ID NO: 6306 - protein, 9 aa, Homo sapiens
  Table 3 sequence identifier: Q13867_C189
  MOD_RES (6)..(6): May or may not be conjugated to a chemical probe
KMREFCIRL

SEQ ID NO: 6307 - protein, 17 aa, Homo sapiens
  Table 3 sequence identifier: Q13404_C71
  MOD_RES (4)..(4): May or may not be conjugated to a chemical probe
KIECGPKYPEAPPFVRF

SEQ ID NO: 6308 - protein, 16 aa, Homo sapiens
  Table 3 sequence identifier: Q9BVA0_C344
  MOD_RES (10)..(10): May or may not be conjugated to a chemical probe
RIYERPSTTCSKPQRV

SEQ ID NO: 6309 - protein, 17 aa, Homo sapiens
  Table 3 sequence identifier: O60504_C521
  MOD_RES (5)..(5): May or may not be conjugated to a chemical probe
RLRLCDDGPQLPTSPRL

SEQ ID NO: 6310 - protein, 53 aa, Homo sapiens
  Table 3 sequence identifier: P07437_C127
  MOD_RES (25)..(25): May or may not be conjugated to a chemical probe
KGHYTEGAELVDSVLDVVRKEAESCDCLQGFQLTHSLGGGTGSGMGTLLISKI

SEQ ID NO: 6311 - protein, 14 aa, Homo sapiens
  Table 3 sequence identifier: Q96SW2_C287
  MOD_RES (5)..(5): May or may not be conjugated to a chemical probe
RVAACLPIDDVLRI

SEQ ID NO: 6312 - protein, 22 aa, Homo sapiens
  Table 3 sequence identifier: Q9Y490_C1023
  MOD_RES (19)..(19): May or may not be conjugated to a chemical probe
KASVPTIQDQASAMQLSQCAKN

SEQ ID NO: 6313 - protein, 16 aa, Homo sapiens
  Table 3 sequence identifier: Q9Y490_C2161
  MOD_RES (8)..(8): May or may not be conjugated to a chemical probe
RQELAVFCSPEPPAKT

SEQ ID NO: 6314 - protein, 24 aa, Homo sapiens
  Table 3 sequence identifier: Q86W56_C963
  MOD_RES (13)..(13): May or may not be conjugated to a chemical probe
KLYPFIYHAVESCAETADHSGQRT

SEQ ID NO: 6315 - protein, 11 aa, Homo sapiens
  Table 3 sequence identifier: P49005_C83
  MOD_RES (3)..(3): May or may not be conjugated to a chemical probe
KLCELQPEEKC

SEQ ID NO: 6316 - protein, 26 aa, Homo sapiens
  Table 3 sequence identifier: P49005_C404
  MOD_RES (16)..(16): May or may not be conjugated to a chemical probe
KTDPFIFPECPHVYFCGNTPSFGSKI

SEQ ID NO: 6317 - protein, 36 aa, Homo sapiens
  Table 3 sequence identifier: P49006_C134
  MOD_RES (25)..(25): May or may not be conjugated to a chemical probe
KEGGGDSSASSPTEEEQEQGEIGACSDEGTAQEGKA

SEQ ID NO: 6318 - protein, 23 aa, Homo sapiens
  Table 3 sequence identifier: Q05932_C209
  MOD_RES (17)..(17): May or may not be conjugated to a chemical probe
KVDLAVVEVGIGGAYDCTNIIRK

SEQ ID NO: 6319 - protein, 14 aa, Homo sapiens
  Table 3 sequence identifier: Q9Y3D6_C41
  MOD_RES (10)..(10): May or may not be conjugated to a chemical probe
KSTQFEYAWCLVRS

SEQ ID NO: 6320 - protein, 14 aa, Homo sapiens
  Table 3 sequence identifier: O94916_C270
  MOD_RES (7)..(7): May or may not be conjugated to a chemical probe
KKSPMLCGQYPVKS

SEQ ID NO: 6321 - protein, 22 aa, Homo sapiens
  Table 3 sequence identifier: P27708_C1374
  MOD_RES (17)..(17): May or may not be conjugated to a chemical probe
KVTAVDWHFEEAVDGECPPQRS

SEQ ID NO: 6322 - protein, 17 aa, Homo sapiens
  Table 3 sequence identifier: Q96LB3_C53
  MOD_RES (3)..(3): May or may not be conjugated to a chemical probe
RGCPIGTGGVLSSQIKV

SEQ ID NO: 6323 - protein, 25 aa, Homo sapiens
  Table 3 sequence identifier: Q96EY9_C13
  MOD_RES (2)..(2): May or may not be conjugated to a chemical probe
KCLEAGSPEPEPAPWQALPVLSEKQ

SEQ ID NO: 6324 - protein, 20 aa, Homo sapiens
  Table 3 sequence identifier: O75608_C211
  MOD_RES (11)..(11): May or may not be conjugated to a chemical probe
KTYEGMMHSSCQQEMMDVKQ

SEQ ID NO: 6325 - protein, 26 aa, Homo sapiens
  Table 3 sequence identifier: P22033_C433
  MOD_RES (14)..(14): May or may not be conjugated to a chemical probe
KVADPWGGSYMMECLTNDVYDAALKL

SEQ ID NO: 6326 - protein, 15 aa, Homo sapiens
  Table 3 sequence identifier: O43290_C560
  MOD_RES (13)..(13): May or may not be conjugated to a chemical probe
KGAIVFNATSEFCRT

SEQ ID NO: 6327 - protein, 21 aa, Homo sapiens
  Table 3 sequence identifier: O43617_C31
  MOD_RES (19)..(19): May or may not be conjugated to a chemical probe
KMSSELFTLTYGALVTQLCKD

SEQ ID NO: 6328 - protein, 19 aa, Homo sapiens
  Table 3 sequence identifier: Q9P258_C337
  MOD_RES (5)..(5): May or may not be conjugated to a chemical probe
RDVACGANHTLVLDSQKRV

SEQ ID NO: 6329 - protein, 8 aa, Homo sapiens
  Table 3 sequence identifier: P61313_C110
  MOD_RES (3)..(3): May or may not be conjugated to a chemical probe
RHCGALRV

SEQ ID NO: 6330 - protein, 27 aa, Homo sapiens
  Table 3 sequence identifier: O95684_C244
  MOD_RES (5)..(5): May or may not be conjugated to a chemical probe
KAGLCPDEDDMEGDSFFDDPIPKPEKT

SEQ ID NO: 6331 - protein, 10 aa, Homo sapiens
  Table 3 sequence identifier: Q17RN3_C36
  MOD_RES (5)..(5): May or may not be conjugated to a chemical probe
RGASCPDFRG

SEQ ID NO: 6332 - protein, 11 aa, Homo sapiens
  Table 3 sequence identifier: P11498_C372
  MOD_RES (5)..(5): May or may not be conjugated to a chemical probe
RINGCAIQCRV

SEQ ID NO: 6333 - protein, 44 aa, Homo sapiens
  Table 3 sequence identifier: Q13263_C152
  MOD_RES (12)..(12): May or may not be conjugated to a chemical probe
KAATDAQDANQCCTSCEDNAPATSYCVECSEPLCETCVEAHQRV

SEQ ID NO: 6334 - protein, 40 aa, Homo sapiens
  Table 3 sequence identifier: Q13263_C717
  MOD_RES (12)..(12): May or may not be conjugated to a chemical probe
RVLLALFCHEPCRPLHQLATDSTFSLDQPGGTLDLTLIRA

SEQ ID NO: 6335 - protein, 9 aa, Homo sapiens
  Table 3 sequence identifier: O75131_C385
  MOD_RES (3)..(3): May or may not be conjugated to a chemical probe
RSCLPQIKL

SEQ ID NO: 6336 - protein, 38 aa, Homo sapiens
  Table 3 sequence identifier: Q16762_C64
  MOD_RES (14)..(14): May or may not be conjugated to a chemical probe
RHVPGASFFDIEECRDTASPYEMMLPSEAGFAEYVGRL

SEQ ID NO: 6337 - protein, 25 aa, Homo sapiens
  Table 3 sequence identifier: Q02790_C103
  MOD_RES (6)..(6): May or may not be conjugated to a chemical probe
KVGEVCHITCKPEYAYGSAGSPPKI

SEQ ID NO: 6338 - protein, 15 aa, Homo sapiens
  Table 3 sequence identifier: Q02790_C342
  MOD_RES (12)..(12): May or may not be conjugated to a chemical probe
KLQAFSAAIESCNKA

SEQ ID NO: 6339 - protein, 12 aa, Homo sapiens
  Table 3 sequence identifier: P26358_C41
  MOD_RES (9)..(9): May or may not be conjugated to a chemical probe
RDSLTEKECVKE

SEQ ID NO: 6340 - protein, 32 aa, Homo sapiens
  Table 3 sequence identifier: P26358_C580
  MOD_RES (29)..(29): May or may not be conjugated to a chemical probe
RHAQFVVEQVESYDEAGDSDEQPIFLTPCMRD

SEQ ID NO: 6341 - protein, 25 aa, Homo sapiens
  Table 3 sequence identifier: Q8TEM1_C767
  MOD_RES (17)..(17): May or may not be conjugated to a chemical probe
RLTLAPVYTSPQLDMSCPLLQQNKQ

SEQ ID NO: 6342 - protein, 8 aa, Homo sapiens
  Table 3 sequence identifier: P61006_C23
  MOD_RES (3)..(3): May or may not be conjugated to a chemical probe
KTCVLFRF

SEQ ID NO: 6343 - protein, 32 aa, Homo sapiens
  Table 3 sequence identifier: O15446_C55
  MOD_RES (27)..(27): May or may not be conjugated to a chemical probe
RFSLEALTGPDTELWLIQAPADFAPECFNGRH

SEQ ID NO: 6344 - protein, 19 aa, Homo sapiens
  Table 3 sequence identifier: P54136_C115
  MOD_RES (7)..(7): May or may not be conjugated to a chemical probe
KFGDYQCNSAMGISQMLKT

SEQ ID NO: 6345 - protein, 13 aa, Homo sapiens
  Table 3 sequence identifier: P36551_C319
  MOD_RES (3)..(3): May or may not be conjugated to a chemical probe
KWCDDYFFIAHRG

SEQ ID NO: 6346 - protein, 21 aa, Homo sapiens
  Table 3 sequence identifier: Q86YV5_C155
  MOD_RES (2)..(2): May or may not be conjugated to a chemical probe
RCPPAYTMVGLHNLEPRGERN

SEQ ID NO: 6347 - protein, 21 aa, Homo sapiens
  Table 3 sequence identifier: Q86YV5_C221
  MOD_RES (12)..(12): May or may not be conjugated to a chemical probe
KLAAFAGTTSGCHQGPGPLRE

SEQ ID NO: 6348 - protein, 20 aa, Homo sapiens
  Table 3 sequence identifier: Q96PV6_C529
  MOD_RES (4)..(4): May or may not be conjugated to a chemical probe
RLTCAPDPSTVRPVAVLKKS

SEQ ID NO: 6349 - protein, 16 aa, Homo sapiens
  Table 3 sequence identifier: P30520_C182
  MOD_RES (3)..(3): May or may not be conjugated to a chemical probe
RMCDLVSDFDGFSERF

SEQ ID NO: 6350 - protein, 11 aa, Homo sapiens
  Table 3 sequence identifier: Q9NV88_C578
  MOD_RES (9)..(9): May or may not be conjugated to a chemical probe
RVSDDVPDCKV

SEQ ID NO: 6351 - protein, 43 aa, Homo sapiens
  Table 3 sequence identifier: P49589_C182
  MOD_RES (10)..(10): May or may not be conjugated to a chemical probe
RLTGEEVNSCVEVLLEEAKDLLSDWLDSTLGCDVTDNSIFSKL

SEQ ID NO: 6352 - protein, 16 aa, Homo sapiens
  Table 3 sequence identifier: P15374_C50
  MOD_RES (4)..(4): May or may not be conjugated to a chemical probe
RPVCAVLLLFPITEKY

SEQ ID NO: 6353 - protein, 17 aa, Homo sapiens
  Table 3 sequence identifier: P55735_C299
  MOD_RES (10)..(10): May or may not be conjugated to a chemical probe
KESVDGQWVCISDVNKG

SEQ ID NO: 6354 - protein, 37 aa, Homo sapiens
  Table 3 sequence identifier: Q9NR09_C1547
  MOD_RES (5)..(5): May or may not be conjugated to a chemical probe
KVSSCTAAEGSFTSLTGLLEVEPLHFTCVSTSDGTRI

SEQ ID NO: 6355 - protein, 31 aa, Homo sapiens
  Table 3 sequence identifier: A8MVX7_C100
  MOD_RES (2)..(2): May or may not be conjugated to a chemical probe
RCYGSVPHSPYQLSAPSDPLDIVITGLYEKP

SEQ ID NO: 6356 - protein, 26 aa, Homo sapiens
  Table 3 sequence identifier: P56192_C333
  MOD_RES (13)..(13): May or may not be conjugated to a chemical probe
KALEEGLTPQEICDKYHIIHADIYRW

SEQ ID NO: 6357 - protein, 11 aa, Homo sapiens
  Table 3 sequence identifier: Q8NAG6_C517
  MOD_RES (8)..(8): May or may not be conjugated to a chemical probe
RKQPHQACPKV

SEQ ID NO: 6358 - protein, 11 aa, Homo sapiens
  Table 3 sequence identifier: P55884_C302
  MOD_RES (9)..(9): May or may not be conjugated to a chemical probe
RYWLEEAECRD

SEQ ID NO: 6359 - protein, 9 aa, Homo sapiens
  Table 3 sequence identifier: Q86V15_C35
  MOD_RES (6)..(6): May or may not be conjugated to a chemical probe
KLNAICAKL

SEQ ID NO: 6360 - protein, 13 aa, Homo sapiens
  Table 3 sequence identifier: Q9H2G2_C1153
  MOD_RES (2)..(2): May or may not be conjugated to a chemical probe
KCHLLVEHETQKL

SEQ ID NO: 6361 - protein, 28 aa, Homo sapiens
  Table 3 sequence identifier: Q99570_C899
  MOD_RES (9)..(9): May or may not be conjugated to a chemical probe
RSESSAGICVPLSTSSQVPEVTTVQNKK

SEQ ID NO: 6362 - protein, 13 aa, Homo sapiens
  Table 3 sequence identifier: Q9BVP2_C251
  MOD_RES (10)..(10): May or may not be conjugated to a chemical probe
KLLGGFQETCSKA

SEQ ID NO: 6363 - protein, 14 aa, Homo sapiens
  Table 3 sequence identifier: Q13813_C1454
  MOD_RES (3)..(3): May or may not be conjugated to a chemical probe
RDCEQAENWMAARE

SEQ ID NO: 6364 - protein, 32 aa, Homo sapiens
  Table 3 sequence identifier: Q6P3S1_C21
  MOD_RES (2)..(2): May or may not be conjugated to a chemical probe
KCHASENEDPVVLWKFPEDFGDQEILQSVPKF

SEQ ID NO: 6365 - protein, 21 aa, Homo sapiens
  Table 3 sequence identifier: P07737_C71
  MOD_RES (2)..(2): May or may not be conjugated to a chemical probe
KCSVIRDSLLQDGEFSMDLRT

SEQ ID NO: 6366 - protein, 15 aa, Homo sapiens
  Table 3 sequence identifier: O00425_C546
  MOD_RES (9)..(9): May or may not be conjugated to a chemical probe
KITGHFYACQVAQRK

SEQ ID NO: 6367 - protein, 13 aa, Homo sapiens
  Table 3 sequence identifier: Q9H832_C154
  MOD_RES (2)..(2): May or may not be conjugated to a chemical probe
RCPPDYPIHPPRV

SEQ ID NO: 6368 - protein, 10 aa, Homo sapiens
  Table 3 sequence identifier: Q9H832_C261
  MOD_RES (2)..(2): May or may not be conjugated to a chemical probe
KCPCPEPLRG

SEQ ID NO: 6369 - protein, 19 aa, Homo sapiens
  Table 3 sequence identifier: Q9UKV8_C188
  MOD_RES (10)..(10): May or may not be conjugated to a chemical probe
RSFFTASEGCSNPLGGGRE

SEQ ID NO: 6370 - protein, 9 aa, Homo sapiens
  Table 3 sequence identifier: Q00796_C350
  MOD_RES (2)..(2): May or may not be conjugated to a chemical probe
KCDPSDQNP

SEQ ID NO: 6371 - protein, 21 aa, Homo sapiens
  Table 3 sequence identifier: Q9Y376_C121
  MOD_RES (9)..(9): May or may not be conjugated to a chemical probe
RTPTVEYICTQQNILFMLLKG

SEQ ID NO: 6372 - protein, 16 aa, Homo sapiens
  Table 3 sequence identifier: P00492_C66
  MOD_RES (12)..(12): May or may not be conjugated to a chemical probe
KEMGGHHIVALCVLKG

SEQ ID NO: 6373 - protein, 29 aa, Homo sapiens
  Table 3 sequence identifier: Q9NVR5_C727
  MOD_RES (13)..(13): May or may not be conjugated to a chemical probe
KALQIDSFGLVTCFQQESLDVSQMILGKS

SEQ ID NO: 6374 - protein, 16 aa, Homo sapiens
  Table 3 sequence identifier: P15498_C652
  MOD_RES (13)..(13): May or may not be conjugated to a chemical probe
RNTSTNEIGWFPCNRV

SEQ ID NO: 6375 - protein, 47 aa, Homo sapiens
  Table 3 sequence identifier: Q92499_C668
  MOD_RES (27)..(27): May or may not be conjugated to a chemical probe
RLKEDGGCTIWYNEMQLLSEIEEHLNCTISQVEPDIKVPVDEFDGKV

SEQ ID NO: 6376 - protein, 12 aa, Homo sapiens
  Table 3 sequence identifier: P08559_C261
  MOD_RES (9)..(9): May or may not be conjugated to a chemical probe
RVDGMDILCVRE

SEQ ID NO: 6377 - protein, 36 aa, Homo sapiens
  Table 3 sequence identifier: Q8IUY3_C274
  MOD_RES (23)..(23): May or may not be conjugated to a chemical probe
RAQVASENGGRWAWPMPGWGPACPKKMPNCSPTAKN

SEQ ID NO: 6378 - protein, 12 aa, Homo sapiens
  Table 3 sequence identifier: Q96PE3_C854
  MOD_RES (5)..(5): May or may not be conjugated to a chemical probe
RSQTCLPELLRF

SEQ ID NO: 6379 - protein, 9 aa, Homo sapiens
  Table 3 sequence identifier: Q9NPD8_C86
  MOD_RES (3)..(3): May or may not be conjugated to a chemical probe
RICLDVLKL

SEQ ID NO: 6380 - protein, 19 aa, Homo sapiens
  Table 3 sequence identifier: Q9H307_C439
  MOD_RES (17)..(17): May or may not be conjugated to a chemical probe
KELEPEMEFEIEPDKECKS

SEQ ID NO: 6381 - protein, 36 aa, Homo sapiens
  Table 3 sequence identifier: P46939_C2003
  MOD_RES (25)..(25): May or may not be conjugated to a chemical probe
RQFHCDLNDLTQWITEAEELLVDTCAPGGSLDLEKA

SEQ ID NO: 6382 - protein, 14 aa, Homo sapiens
  Table 3 sequence identifier: P46939_C2098
  MOD_RES (9)..(9): May or may not be conjugated to a chemical probe
RHQLDEIICWLTKA

SEQ ID NO: 6383 - protein, 10 aa, Homo sapiens
  Table 3 sequence identifier: P46939_C3076
  MOD_RES (3)..(3): May or may not be conjugated to a chemical probe
KECPIVGFRY

SEQ ID NO: 6384 - protein, 17 aa, Homo sapiens
  Table 3 sequence identifier: Q04637_C934
  MOD_RES (13)..(13): May or may not be conjugated to a chemical probe
KLLKNHDEESLECLCRL

SEQ ID NO: 6385 - protein, 28 aa, Homo sapiens
  Table 3 sequence identifier: D6RAD4_C204
  MOD_RES (18)..(18): May or may not be conjugated to a chemical probe
RIFETLGTPTEEQWPDMCSLPDYVTFKS

SEQ ID NO: 6386 - protein, 16 aa, Homo sapiens
  Table 3 sequence identifier: P52701_C579
  MOD_RES (13)..(13): May or may not be conjugated to a chemical probe
KFFIGQFSDDRHCSRF

SEQ ID NO: 6387 - protein, 26 aa, Homo sapiens
  Table 3 sequence identifier: O60292_C1322
  MOD_RES (20)..(20): May or may not be conjugated to a chemical probe
KGGSSDSGIDTTLYTSSPSCMSLAKA

SEQ ID NO: 6388 - protein, 12 aa, Homo sapiens
  Table 3 sequence identifier: Q16831_C17
  MOD_RES (8)..(8): May or may not be conjugated to a chemical probe
KAESHNDCPVRL

SEQ ID NO: 6389 - protein, 9 aa, Homo sapiens
  Table 3 sequence identifier: P49368_C372
  MOD_RES (3)..(3): May or may not be conjugated to a chemical probe
KACTILLRG

SEQ ID NO: 6390 - protein, 25 aa, Homo sapiens
  Table 3 sequence identifier: O75962_C1717
  MOD_RES (19)..(19): May or may not be conjugated to a chemical probe
RTTDRSPAAEGLVPCGSLCIAHSRS

SEQ ID NO: 6391 - protein, 49 aa, Homo sapiens
  Table 3 sequence identifier: O75962_C2327
  MOD_RES (40)..(40): May or may not be conjugated to a chemical probe
RNHSGGGGGGGSGGSGGGGGSGGGGAPSGGSGHSGGPSSCGGAPSTSRS

SEQ ID NO: 6392 - protein, 13 aa, Homo sapiens
  Table 3 sequence identifier: Q53H82_C100
  MOD_RES (10)..(10): May or may not be conjugated to a chemical probe
KSINNDTTYCIKK

SEQ ID NO: 6393 - protein, 9 aa, Homo sapiens
  Table 3 sequence identifier: Q5TC12_C321
  MOD_RES (2)..(2): May or may not be conjugated to a chemical probe
KCAQNQNKT

SEQ ID NO: 6394 - protein, 10 aa, Homo sapiens
  Table 3 sequence identifier: P33992_C221
  MOD_RES (2)..(2): May or may not be conjugated to a chemical probe
KCVDFQTLKL

SEQ ID NO: 6395 - protein, 27 aa, Homo sapiens
  Table 3 sequence identifier: P12081_C455
  MOD_RES (9)..(9): May or may not be conjugated to a chemical probe
KLLNQLQYCEEAGIPLVAIIGEQELKD

SEQ ID NO: 6396 - protein, 14 aa, Homo sapiens
  Table 3 sequence identifier: Q15418_C432
  MOD_RES (12)..(12): May or may not be conjugated to a chemical probe
KETIGVGSYSECKR

SEQ ID NO: 6397 - protein, 12 aa, Homo sapiens
  Table 3 sequence identifier: P49590_C236
  MOD_RES (6)..(6): May or may not be conjugated to a chemical probe
KFRAICSSIDKL

SEQ ID NO: 6398 - protein, 21 aa, Homo sapiens
  Table 3 sequence identifier: O14893_C63
  MOD_RES (9)..(9): May or may not be conjugated to a chemical probe
RVQIEAAQCPDVVVAQIDPKK

SEQ ID NO: 6399 - protein, 12 aa, Homo sapiens
  Table 3 sequence identifier: Q9H0D6_C557
  MOD_RES (7)..(7): May or may not be conjugated to a chemical probe
RYYYQGCASWKW

SEQ ID NO: 6400 - protein, 13 aa, Homo sapiens
  Table 3 sequence identifier: Q4G0F5_C334
  MOD_RES (11)..(11): May or may not be conjugated to a chemical probe
RTPSQLSDNNCRQ

SEQ ID NO: 6401 - protein, 16 aa, Homo sapiens
  Table 3 sequence identifier: P08567_C59
  MOD_RES (9)..(9): May or may not be conjugated to a chemical probe
KGSTLTSPCQDFGKRM

SEQ ID NO: 6402 - protein, 27 aa, Homo sapiens
  Table 3 sequence identifier: P50135_C196
  MOD_RES (8)..(8): May or may not be conjugated to a chemical probe
RFPQDDLCQYITSDDLTQMLDNLGLKY

SEQ ID NO: 6403 - protein, 10 aa, Homo sapiens
  Table 3 sequence identifier: Q9BXF6_C66
  MOD_RES (5)..(5): May or may not be conjugated to a chemical probe
KTHGCPEWRE

SEQ ID NO: 6404 - protein, 29 aa, Homo sapiens
  Table 3 sequence identifier: P51668_C111
  MOD_RES (11)..(11): May or may not be conjugated to a chemical probe
KVLLSICSLLCDPNPDDPLVPDIAQIYKS

SEQ ID NO: 6405 - protein, 12 aa, Homo sapiens
  Table 3 sequence identifier: Q5T0L3_C212
  MOD_RES (6)..(6): May or may not be conjugated to a chemical probe
REGFSCKVYYRK

SEQ ID NO: 6406 - protein, 11 aa, Homo sapiens
  Table 3 sequence identifier: A6NHR9_C897
  MOD_RES (7)..(7): May or may not be conjugated to a chemical probe
KGPVNSCQGKN

SEQ ID NO: 6407 - protein, 18 aa, Homo sapiens
  Table 3 sequence identifier: A6NHR9_C1899
  MOD_RES (3)..(3): May or may not be conjugated to a chemical probe
KQCLILGEQIDLLQQYRS

SEQ ID NO: 6408 - protein, 30 aa, Homo sapiens
  Table 3 sequence identifier: Q12824_C167
  MOD_RES (6)..(6): May or may not be conjugated to a chemical probe
RTFPLCFDDHDPAVIHENASQPEVLVPIRL

SEQ ID NO: 6409 - protein, 26 aa, Homo sapiens
  Table 3 sequence identifier: Q969R8_C438
  MOD_RES (17)..(17): May or may not be conjugated to a chemical probe
RALLHQTLYHPDQPPQCAPSSLQDPT

SEQ ID NO: 6410 - protein, 23 aa, Homo sapiens
  Table 3 sequence identifier: P17544_C61
  MOD_RES (3)..(3): May or may not be conjugated to a chemical probe
KNCEEVGLFNELASSFEHEFKKA

SEQ ID NO: 6411 - protein, 10 aa, Homo sapiens
  Table 3 sequence identifier: O00410_C1057
  MOD_RES (6)..(6): May or may not be conjugated to a chemical probe
KHEDPCAKRL

SEQ ID NO: 6412 - protein, 12 aa, Homo sapiens
  Table 3 sequence identifier: Q9BT25_C354
  MOD_RES (10)..(10): May or may not be conjugated to a chemical probe
RWYFNQDSACRE

SEQ ID NO: 6413 - protein, 18 aa, Homo sapiens
  Table 3 sequence identifier: O95861_C206
  MOD_RES (6)..(6): May or may not be conjugated to a chemical probe
KLVTDCVAAMNPDAVLRV

SEQ ID NO: 6414 - protein, 15 aa, Homo sapiens
  Table 3 sequence identifier: O15260_C32
  MOD_RES (3)..(3): May or may not be conjugated to a chemical probe
RLCLISTFLEDGIRM

SEQ ID NO: 6415 - protein, 19 aa, Homo sapiens
  Table 3 sequence identifier: P35580_C1238
  MOD_RES (15)..(15): May or may not be conjugated to a chemical probe
KNKQGLETDNKELACEVKV

SEQ ID NO: 6416 - protein, 11 aa, Homo sapiens
  Table 3 sequence identifier: P35270_C171
  MOD_RES (7)..(7): May or may not be conjugated to a chemical probe
KGWALYCAGKA

SEQ ID NO: 6417 - protein, 18 aa, Homo sapiens
  Table 3 sequence identifier: P42330_C193
  MOD_RES (11)..(11): May or may not be conjugated to a chemical probe
KYKPVCNQVECHPYFNRS

SEQ ID NO: 6418 - protein, 15 aa, Homo sapiens
  Table 3 sequence identifier: P42331_C302
  MOD_RES (10)..(10): May or may not be conjugated to a chemical probe
RFLHEIQLNCAVNKM

SEQ ID NO: 6419 - protein, 13 aa, Homo sapiens
  Table 3 sequence identifier: Q9Y230_C227
  MOD_RES (5)..(5): May or may not be conjugated to a chemical probe
KFVQCPDGELQKR

SEQ ID NO: 6420 - protein, 23 aa, Homo sapiens
  Table 3 sequence identifier: Q92621_C877
  MOD_RES (10)..(10): May or may not be conjugated to a chemical probe
RESQLALIVCPLEQLLQGINPRT

SEQ ID NO: 6421 - protein, 22 aa, Homo sapiens
  Table 3 sequence identifier: Q92621_C1297
  MOD_RES (11)..(11): May or may not be conjugated to a chemical probe
RQLVEIILTACPQDLIQAEDRQ

SEQ ID NO: 6422 - protein, 37 aa, Homo sapiens
  Table 3 sequence identifier: P42025_C222
  MOD_RES (3)..(3): May or may not be conjugated to a chemical probe
RACYLSINPQKDEALETEKVQYTLPDGSTLDVGPARF

SEQ ID NO: 6423 - protein, 16 aa, Homo sapiens
  Table 3 sequence identifier: Q5H9R7_C844
  MOD_RES (2)..(2): May or may not be conjugated to a chemical probe
KCAAPRPPSSSPEQRT

SEQ ID NO: 6424 - protein, 11 aa, Homo sapiens
  Table 3 sequence identifier: Q02241_C447
  MOD_RES (4)..(4): May or may not be conjugated to a chemical probe
KAICGLTPGRR

SEQ ID NO: 6425 - protein, 22 aa, Homo sapiens
  Table 3 sequence identifier: O94915_C888
  MOD_RES (2)..(2): May or may not be conjugated to a chemical probe
RCSPPETLASTPDSGYSIDSKI

SEQ ID NO: 6426 - protein, 10 aa, Homo sapiens
  Table 3 sequence identifier: P53621_C245
  MOD_RES (8)..(8): May or may not be conjugated to a chemical probe
KAWEVDTCRG

SEQ ID NO: 6427 - protein, 15 aa, Homo sapiens
  Table 3 sequence identifier: P53621_C522
  MOD_RES (7)..(7): May or may not be conjugated to a chemical probe
RKLDALCNIHENIRV

SEQ ID NO: 6428 - protein, 10 aa, Homo sapiens
  Table 3 sequence identifier: O43678_C58
  MOD_RES (3)..(3): May or may not be conjugated to a chemical probe
RECSDVQPKL

SEQ ID NO: 6429 - protein, 28 aa, Homo sapiens
  Table 3 sequence identifier: Q14116_C74
  MOD_RES (26)..(26): May or may not be conjugated to a chemical probe
RNLNDQVLFIDQGNRPLFEDMTDSDCRD

SEQ ID NO: 6430 - protein, 21 aa, Homo sapiens
  Table 3 sequence identifier: Q86Y37_C362
  MOD_RES (16)..(16): May or may not be conjugated to a chemical probe
RKRAGDELAYNSSSACASSRG

SEQ ID NO: 6431 - protein, 22 aa, Homo sapiens
  Table 3 sequence identifier: Q99704_C115
  MOD_RES (20)..(20): May or may not be conjugated to a chemical probe
RSHLLAADAPSSAAWVQTLCRN

SEQ ID NO: 6432 - protein, 11 aa, Homo sapiens
  Table 3 sequence identifier: O75153_C214
  MOD_RES (8)..(8): May or may not be conjugated to a chemical probe
RDWKPLQCLKV

SEQ ID NO: 6433 - protein, 15 aa, Homo sapiens
  Table 3 sequence identifier: Q99961_C147
  MOD_RES (12)..(12): May or may not be conjugated to a chemical probe
KQNFIDPLQNLCEKD

SEQ ID NO: 6434 - protein, 9 aa, Homo sapiens
  Table 3 sequence identifier: O43294_C416
  MOD_RES (2)..(2): May or may not be conjugated to a chemical probe
RCVSALGRR

SEQ ID NO: 6435 - protein, 44 aa, Homo sapiens
  Table 3 sequence identifier: Q7Z7H8_C213
  MOD_RES (18)..(18): May or may not be conjugated to a chemical probe
KLPSLPLVQGELVGGLTCLTAQTHSLLQHQPLQLTTLLDQYIRE

SEQ ID NO: 6436 - protein, 43 aa, Homo sapiens
  Table 3 sequence identifier: Q96IF1_C182
  MOD_RES (11)..(11): May or may not be conjugated to a chemical probe
RHGSPLPAGPCLFGPPLAGAPAGYSPGGVPSAYPELHAALDRL

SEQ ID NO: 6437 - protein, 14 aa, Homo sapiens
  Table 3 sequence identifier: Q8NC26_C51
  MOD_RES (12)..(12): May or may not be conjugated to a chemical probe
RNLAFIDWATPCKT

SEQ ID NO: 6438 - protein, 10 aa, Homo sapiens
  Table 3 sequence identifier: Q8NC26_C136
  MOD_RES (8)..(8): May or may not be conjugated to a chemical probe
RNHSKPTCRL

SEQ ID NO: 6439 - protein, 13 aa, Homo sapiens
  Table 3 sequence identifier: P21266_C39
  MOD_RES (4)..(4): May or may not be conjugated to a chemical probe
RYTCGEAPDYDRS

SEQ ID NO: 6440 - protein, 24 aa, Homo sapiens
  Table 3 sequence identifier: Q8WXA9_C494
  MOD_RES (13)..(13): May or may not be conjugated to a chemical probe
RTEENKIQHNGNCQLNEENLSTKT

SEQ ID NO: 6441 - protein, 10 aa, Homo sapiens
  Table 4 sequence identifier: Q13418_C239
  MOD_RES (7)..(7): May or may not be conjugated to a chemical probe
RDFNEECPRL

SEQ ID NO: 6442 - protein, 11 aa, Homo sapiens
  Table 4 sequence identifier: P07203_C156
  MOD_RES (9)..(9): May or may not be conjugated to a chemical probe
KLITWSPVCRN

SEQ ID NO: 6443 - protein, 23 aa, Homo sapiens
  Table 4 sequence identifier: P00390_C102
  MOD_RES (14)..(14): May or may not be conjugated to a chemical probe
RAAVVESHKLGGTCVNVGCVPKK

SEQ ID NO: 6444 - protein, 21 aa, Homo sapiens
  Table 4 sequence identifier: P07203_C78
  MOD_RES (10)..(10): May or may not be conjugated to a chemical probe
RGLVVLGFPCNQFGHQENAKN

SEQ ID NO: 6445 - protein, 16 aa, Homo sapiens
  Table 4 sequence identifier: Q9BRA2_C43
  MOD_RES (4)..(4): May or may not be conjugated to a chemical probe
KSWCPDCVQAEPVVRE

SEQ ID NO: 6446 - protein, 21 aa, Homo sapiens
  Table 4 sequence identifier: Q01844_C524
  MOD_RES (7)..(7): May or may not be conjugated to a chemical probe
RAGDWQCPNPGCGNQNFAWRT

SEQ ID NO: 6447 - protein, 19 aa, Homo sapiens
  Table 4 sequence identifier: Q99798_C385
  MOD_RES (8)..(8): May or may not be conjugated to a chemical probe
RVGLIGSCTNSSYEDMGRS

SEQ ID NO: 6448 - protein, 24 aa, Homo sapiens
  Table 4 sequence identifier: P18031_C215
  MOD_RES (17)..(17): May or may not be conjugated to a chemical probe
RESGSLSPEHGPVVVHCSAGIGRS

SEQ ID NO: 6449 - protein, 20 aa, Homo sapiens
  Table 4 sequence identifier: Q9Y2R4_C536
  MOD_RES (12)..(12): May or may not be conjugated to a chemical probe
RSVANVIQQAGCPVPEYIKG

SEQ ID NO: 6450 - protein, 31 aa, Homo sapiens
  Table 4 sequence identifier: P53621_C921
  MOD_RES (10)..(10): May or may not be conjugated to a chemical probe
KGTSPTQIWCNNSQLPVDHILAGSFETAMRL

SEQ ID NO: 6451 - protein, 14 aa, Homo sapiens
  Table 4 sequence identifier: P31930_C380
  MOD_RES (3)..(3): May or may not be conjugated to a chemical probe
RLCTSATESEVARG

SEQ ID NO: 6452 - protein, 12 aa, Homo sapiens
  Table 4 sequence identifier: P09211_C48
  MOD_RES (4)..(4): May or may not be conjugated to a chemical probe
KASCLYGQLPKF

SEQ ID NO: 6453 - protein, 14 aa, Homo sapiens
  Table 4 sequence identifier: P46459_C264
  MOD_RES (11)..(11): May or may not be conjugated to a chemical probe
KGILLYGPPGCGKT

SEQ ID NO: 6454 - protein, 10 aa, Homo sapiens
  Table 4 sequence identifier: Q9NR56_C43
  MOD_RES (3)..(3): May or may not be conjugated to a chemical probe
KSCQVENGRV

SEQ ID NO: 6455 - protein, 10 aa, Homo sapiens
  Table 4 sequence identifier: Q5VZF2_C43
  MOD_RES (3)..(3): May or may not be conjugated to a chemical probe
KSCQVENGRV

SEQ ID NO: 6456 - protein, 14 aa, Homo sapiens
  Table 4 sequence identifier: P49368_C455
  MOD_RES (7)..(7): May or may not be conjugated to a chemical probe
RTLIQNCGASTIRL

SEQ ID NO: 6457 - protein, 11 aa, Homo sapiens
  Table 4 sequence identifier: P47756_C62
  MOD_RES (6)..(6): May or may not be conjugated to a chemical probe
KDYLLCDYNRD

SEQ ID NO: 6458 - protein, 30 aa, Homo sapiens
  Table 4 sequence identifier: P57737_C42
  MOD_RES (4)..(4): May or may not be conjugated to a chemical probe
KSSCSLIAFNSDRPGVLGIVPLQGQGEDKR

SEQ ID NO: 6459 - protein, 11 aa, Homo sapiens
  Table 4 sequence identifier: Q9BV79_C263
  MOD_RES (6)..(6): May or may not be conjugated to a chemical probe
RLALNCVGGKS

SEQ ID NO: 6460 - protein, 11 aa, Homo sapiens
  Table 4 sequence identifier: P13010_C339
  MOD_RES (2)..(2): May or may not be conjugated to a chemical probe
KCFSVLGFCKS

SEQ ID NO: 6461 - protein, 9 aa, Homo sapiens
  Table 4 sequence identifier: Q9H2U2_C302
  MOD_RES (2)..(2): May or may not be conjugated to a chemical probe
RCTQEEARS

SEQ ID NO: 6462 - protein, 11 aa, Homo sapiens
  Table 4 sequence identifier: P13010_C346
  MOD_RES (9)..(9): May or may not be conjugated to a chemical probe
KCFSVLGFCKS

SEQ ID NO: 6463 - protein, 11 aa, Homo sapiens
  Table 4 sequence identifier: Q16875_C102
  MOD_RES (4)..(4): May or may not be conjugated to a chemical probe
RKQCALAALRD

SEQ ID NO: 6464 - protein, 9 aa, Homo sapiens
  Table 4 sequence identifier: P14866_C452
  MOD_RES (5)..(5): May or may not be conjugated to a chemical probe
KLNVCVSKQ

SEQ ID NO: 6465 - protein, 23 aa, Homo sapiens
  Table 4 sequence identifier: Q99798_C448
  MOD_RES (12)..(12): May or may not be conjugated to a chemical probe
RDLGGIVLANACGPCIGQWDRKD

SEQ ID NO: 6466 - protein, 23 aa, Homo sapiens
  Table 4 sequence identifier: Q99798_C451
  MOD_RES (15)..(15): May or may not be conjugated to a chemical probe
RDLGGIVLANACGPCIGQWDRKD

SEQ ID NO: 6467 - protein, 17 aa, Homo sapiens
  Table 4 sequence identifier: Q9C0B1_C326
  MOD_RES (5)..(5): May or may not be conjugated to a chemical probe
RVAECSTGTLDYILQRC

SEQ ID NO: 6468 - protein, 19 aa, Homo sapiens
  Table 4 sequence identifier: Q92947_C115
  MOD_RES (5)..(5): May or may not be conjugated to a chemical probe
KGYGCAGVSSVAYGLLARE

SEQ ID NO: 6469 - protein, 33 aa, Homo sapiens; identical to SEQ ID NO: 1446
  Table 4 sequence identifier: Q92597_C168
  MOD_RES (21)..(21): May or may not be conjugated to a chemical probe

SEQ ID NO: 6470 - protein, 25 aa, Homo sapiens
  Table 4 sequence identifier: P09874_C298
  MOD_RES (17)..(17): May or may not be conjugated to a chemical probe
RVADGMVFGALLPCEECSGQLVFKS

SEQ ID NO: 6471 - protein, 30 aa, Homo sapiens; identical to SEQ ID NO: 2843
  Table 4 sequence identifier: P55036_C58
  MOD_RES (17)..(17): May or may not be conjugated to a chemical probe

SEQ ID NO: 6472 - protein, 21 aa, Homo sapiens
  Table 4 sequence identifier: A6NHR9_C1433
  MOD_RES (18)..(18): May or may not be conjugated to a chemical probe
KLSTSGNRPPANAETFSCNKI

SEQ ID NO: 6473 - protein, 29 aa, Homo sapiens
  Table 4 sequence identifier: Q2M2I8_C270
  MOD_RES (17)..(17): May or may not be conjugated to a chemical probe
KLCYFTLPFGESQVAICDGNFTIPDNSRY

SEQ ID NO: 6474 - protein, 24 aa, Homo sapiens
  Table 4 sequence identifier: O14880_C56
  MOD_RES (20)..(20): May or may not be conjugated to a chemical probe
KVEYPIMYSTDPENGHIFNCIQRA

SEQ ID NO: 6475 - protein, 9 aa, Homo sapiens
  Table 4 sequence identifier: Q9C0J8_C120
  MOD_RES (2)..(2): May or may not be conjugated to a chemical probe
KCPVFVVRW

SEQ ID NO: 6476 - protein, 17 aa, Homo sapiens
  Table 4 sequence identifier: Q96ME7_C430
  MOD_RES (7)..(7): May or may not be conjugated to a chemical probe
KAHLGSCTLGNFVAGKY

SEQ ID NO: 6477 - protein, 24 aa, Homo sapiens
  Table 4 sequence identifier: Q01813_C641
  MOD_RES (5)..(5): May or may not be conjugated to a chemical probe
RNESCSENYTTDFIYQLYSEEGKG

SEQ ID NO: 6478 - protein, 21 aa, Homo sapiens
  Table 4 sequence identifier: P21333_C810
  MOD_RES (2)..(2): May or may not be conjugated to a chemical probe
KCAPGVVGPAEADIDFDIIRN

SEQ ID NO: 6479 - protein, 22 aa, Homo sapiens
  Table 4 sequence identifier: P07858_C108
  MOD_RES (9)..(9): May or may not be conjugated to a chemical probe
RDQGSCGSCWAFGAVEAISDRI

SEQ ID NO: 6480 - protein, 17 aa, Homo sapiens
  Table 4 sequence identifier: Q9UGI8_C22
  MOD_RES (14)..(14): May or may not be conjugated to a chemical probe
KMGLGHEQGFGAPCLKC

SEQ ID NO: 6481 - protein, 24 aa, Homo sapiens
  Table 4 sequence identifier: P48047_C141
  MOD_RES (6)..(6): May or may not be conjugated to a chemical probe
RGEVPCTVTSASPLEEATLSELKT

SEQ ID NO: 6482 - protein, 21 aa, Homo sapiens
  Table 4 sequence identifier: P27707_C59
  MOD_RES (3)..(3): May or may not be conjugated to a chemical probe
RWCNVQSTQDEFEELTMSQKN

SEQ ID NO: 6483 - protein, 10 aa, Homo sapiens
  Table 4 sequence identifier: Q9C0J8_C249
  MOD_RES (2)..(2): May or may not be conjugated to a chemical probe
KCVDWHPTKG

SEQ ID NO: 6484 - protein, 16 aa, Homo sapiens
  Table 4 sequence identifier: Q9UMS4_C298
  MOD_RES (10)..(10): May or may not be conjugated to a chemical probe
RIWSVPNASCVQVVRA

SEQ ID NO: 6485 - protein, 33 aa, Homo sapiens; identical to SEQ ID NO: 136
  Table 4 sequence identifier: P25705_C294
  MOD_RES (25)..(25): May or may not be conjugated to a chemical probe

SEQ ID NO: 6486 - protein, 17 aa, Homo sapiens
  Table 4 sequence identifier: H3BQZ7_C518
  MOD_RES (13)..(13): May or may not be conjugated to a chemical probe
KSRDLLVQQASQCLSKL

SEQ ID NO: 6487 - protein, 17 aa, Homo sapiens
  Table 4 sequence identifier: Q1KMD3_C518
  MOD_RES (13)..(13): May or may not be conjugated to a chemical probe
KSRDLLVQQASQCLSKL

SEQ ID NO: 6488 - protein, 25 aa, Homo sapiens
  Table 4 sequence identifier: Q8IW45_C82
  MOD_RES (8)..(8): May or may not be conjugated to a chemical probe
RIGVVGGCQEYTGAPYFAAISALKV

SEQ ID NO: 6489 - protein, 18 aa, Homo sapiens
  Table 4 sequence identifier: P09110_C177
  MOD_RES (3)..(3): May or may not be conjugated to a chemical probe
RDCLIPMGITSENVAERF

SEQ ID NO: 6490 - protein, 17 aa, Homo sapiens
  Table 4 sequence identifier: P34949_C11
  MOD_RES (7)..(7): May or may not be conjugated to a chemical probe
RVFPLSCAVQQYAWGKM

SEQ ID NO: 6491 - protein, 15 aa, Homo sapiens
  Table 4 sequence identifier: Q7RTV0_C49
  MOD_RES (6)..(6): May or may not be conjugated to a chemical probe
RICDECNYGSYQGRC

SEQ ID NO: 6492 - protein, 29 aa, Homo sapiens
  Table 4 sequence identifier: Q9BWD1_C65
  MOD_RES (22)..(22): May or may not be conjugated to a chemical probe
RATVAPEDVSEVIFGHVLAAGCGQNPVRQ

SEQ ID NO: 6493 - protein, 17 aa, Homo sapiens
  Table 4 sequence identifier: P48735_C154
  MOD_RES (15)..(15): May or may not be conjugated to a chemical probe
RNILGGTVFREPIICKN

SEQ ID NO: 6494 - protein, 17 aa, Homo sapiens
  Table 4 sequence identifier: P51665_C116
  MOD_RES (3)..(3): May or may not be conjugated to a chemical probe
RYCPNSVLVIIDVKPKD

SEQ ID NO: 6495 - protein, 23 aa, Homo sapiens
  Table 4 sequence identifier: Q6YN16_C218
  MOD_RES (21)..(21): May or may not be conjugated to a chemical probe
KTAIHTAAMDMLGGPGIESQCRK

SEQ ID NO: 6496 - protein, 11 aa, Homo sapiens
  Table 4 sequence identifier: P14866_C581
  MOD_RES (3)..(3): May or may not be conjugated to a chemical probe
KLCFSTAQHAS

SEQ ID NO: 6497 - protein, 9 aa, Homo sapiens
  Table 4 sequence identifier: P78417_C32
  MOD_RES (3)..(3): May or may not be conjugated to a chemical probe
RFCPFAERT

SEQ ID NO: 6498 - protein, 11 aa, Homo sapiens
  Table 4 sequence identifier: P51610_C1872
  MOD_RES (8)..(8): May or may not be conjugated to a chemical probe
RVAGINACGRG

SEQ ID NO: 6499 - protein, 25 aa, Homo sapiens
  Table 4 sequence identifier: Q86WV6_C206
  MOD_RES (10)..(10): May or may not be conjugated to a chemical probe
RLYILLPLDCGVPDNLSMADPNIRF

SEQ ID NO: 6500 - protein, 26 aa, Homo sapiens
  Table 4 sequence identifier: P08559_C181
  MOD_RES (24)..(24): May or may not be conjugated to a chemical probe
KNFYGGNGIVGAQVPLGAGIALACKY

SEQ ID NO: 6501 - protein, 19 aa, Homo sapiens
  Table 4 sequence identifier: O60318_C1285
  MOD_RES (9)..(9): May or may not be conjugated to a chemical probe
RALAPSAECPIAEENLARG

SEQ ID NO: 6502 - protein, 16 aa, Homo sapiens
  Table 4 sequence identifier: P78527_C4106
  MOD_RES (2)..(2): May or may not be conjugated to a chemical probe
KCLMDQATDPNILGRT

SEQ ID NO: 6503 - protein, 8 aa, Homo sapiens
  Table 4 sequence identifier: P31943_C34
  MOD_RES (6)..(6): May or may not be conjugated to a chemical probe
RFFSDCKI

SEQ ID NO: 6504 - protein, 14 aa, Homo sapiens
  Table 4 sequence identifier: P62333_C170
  MOD_RES (3)..(3): May or may not be conjugated to a chemical probe
KGCLLYGPPGTGKT

SEQ ID NO: 6505 - protein, 13 aa, Homo sapiens
  Table 4 sequence identifier: O14776_C1062
  MOD_RES (7)..(7): May or may not be conjugated to a chemical probe
RYLVLDCVPEERR

SEQ ID NO: 6506 - protein, 11 aa, Homo sapiens
  Table 4 sequence identifier: Q9Y3Z3_C341
  MOD_RES (3)..(3): May or may not be conjugated to a chemical probe
RVCEVDNELRI

SEQ ID NO: 6507 - protein, 17 aa, Homo sapiens
  Table 4 sequence identifier: Q96GM5_C460
  MOD_RES (15)..(15): May or may not be conjugated to a chemical probe
RDPQGFINDWLQSQCRD

SEQ ID NO: 6508 - protein, 14 aa, Homo sapiens
  Table 4 sequence identifier: P29350_C361
  MOD_RES (2)..(2): May or may not be conjugated to a chemical probe
KCVPYWPEVGMQRA

SEQ ID NO: 6509 - protein, 23 aa, Homo sapiens
  Table 4 sequence identifier: P14625_C645
  MOD_RES (7)..(7): May or may not be conjugated to a chemical probe
RLTESPCALVASQYGWSGNMERI

SEQ ID NO: 6510 - protein, 32 aa, Homo sapiens; identical to SEQ ID NO: 4345
  Table 4 sequence identifier: P10515_C586
  MOD_RES (13)..(13): May or may not be conjugated to a chemical probe

SEQ ID NO: 6511 - protein, 15 aa, Homo sapiens
  Table 4 sequence identifier: P02042_C94
  MOD_RES (12)..(12): May or may not be conjugated to a chemical probe
KGTFSQLSELHCDKL

SEQ ID NO: 6512 - protein, 11 aa, Homo sapiens
  Table 4 sequence identifier: P14174_C81
  MOD_RES (4)..(4): May or may not be conjugated to a chemical probe
KLLCGLLAERL

SEQ ID NO: 6513 - protein, 10 aa, Homo sapiens
  Table 4 sequence identifier: P04083_C343
  MOD_RES (7)..(7): May or may not be conjugated to a chemical probe
KILVALCGGN

SEQ ID NO: 6514 - protein, 16 aa, Homo sapiens
  Table 4 sequence identifier: P04406_C247
  MOD_RES (14)..(14): May or may not be conjugated to a chemical probe
RVPTANVSVVDLTCRL

SEQ ID NO: 6515 - protein, 10 aa, Homo sapiens
  Table 4 sequence identifier: O94901_C657
  MOD_RES (2)..(2): May or may not be conjugated to a chemical probe
RCSETYETKT

SEQ ID NO: 6516 - protein, 10 aa, Homo sapiens
  Table 4 sequence identifier: Q9UH99_C563
  MOD_RES (2)..(2): May or may not be conjugated to a chemical probe
RCSETYETKT

SEQ ID NO: 6517 - protein, 12 aa, Homo sapiens
  Table 4 sequence identifier: P13796_C42
  MOD_RES (4)..(4): May or may not be conjugated to a chemical probe
KAACLPLPGYRV

SEQ ID NO: 6518 - protein, 27 aa, Homo sapiens
  Table 4 sequence identifier: O95985_C217
  MOD_RES (15)..(15): May or may not be conjugated to a chemical probe
KYGDLDSSLISFGPCQTPTLGFCVERH

SEQ ID NO: 6519 - protein, 25 aa, Homo sapiens
  Table 4 sequence identifier: P00367_C376
  MOD_RES (14)..(14): May or may not be conjugated to a chemical probe
KAKPYEGSILEADCDILIPAASEKQ

SEQ ID NO: 6520 - protein, 22 aa, Homo sapiens
  Table 4 sequence identifier: P49840_C380
  MOD_RES (10)..(10): May or may not be conjugated to a chemical probe
RTPPEAIALCSSLLEYTPSSRL

SEQ ID NO: 6521 - protein, 11 aa, Homo sapiens
  Table 4 sequence identifier: P12814_C154
  MOD_RES (8)..(8): May or may not be conjugated to a chemical probe
KEGLLLWCQRK

SEQ ID NO: 6522 - protein, 28 aa, Homo sapiens
  Table 4 sequence identifier: P55084_C458
  MOD_RES (12)..(12): May or may not be conjugated to a chemical probe
KEGGQYGLVAACAAGGQGHAMIVEAYPK

SEQ ID NO: 6523 - protein, 11 aa, Homo sapiens
  Table 4 sequence identifier: P63220_C56
  MOD_RES (6)..(6): May or may not be conjugated to a chemical probe
KTYAICGAIRR

SEQ ID NO: 6524 - protein, 11 aa, Homo sapiens
  Table 4 sequence identifier: O43707_C173
  MOD_RES (8)..(8): May or may not be conjugated to a chemical probe
KEGLLLWCQRK

SEQ ID NO: 6525 - protein, 25 aa, Homo sapiens
  Table 4 sequence identifier: Q49A26_C356
  MOD_RES (2)..(2): May or may not be conjugated to a chemical probe
KCYVDMSTVDADTVTELAQVIVSRG

SEQ ID NO: 6526 - protein, 10 aa, Homo sapiens
  Table 4 sequence identifier: Q9NYL9_C231
  MOD_RES (2)..(2): May or may not be conjugated to a chemical probe
KCFSLAATRS

SEQ ID NO: 6527 - protein, 9 aa, Homo sapiens
  Table 4 sequence identifier: Q63HN8_C2943
  MOD_RES (7)..(7): May or may not be conjugated to a chemical probe
KAYETVCKR

SEQ ID NO: 6528 - protein, 22 aa, Homo sapiens
  Table 4 sequence identifier: P27987_C740
  MOD_RES (16)..(16): May or may not be conjugated to a chemical probe
RYNQMDDLLADFDSPCVMDCKM

SEQ ID NO: 6529 - protein, 16 aa, Homo sapiens
  Table 4 sequence identifier: Q96F15_C185
  MOD_RES (3)..(3): May or may not be conjugated to a chemical probe
RYCAFNNWGSVEEQRQ

SEQ ID NO: 6530 - protein, 22 aa, Homo sapiens
  Table 4 sequence identifier: Q13501_C131
  MOD_RES (13)..(13): May or may not be conjugated to a chemical probe
RNMVHPNVICDGCNGPVVGTRY

SEQ ID NO: 6531 - protein, 11 aa, Homo sapiens
  Table 4 sequence identifier: P00441_C147
  MOD_RES (4)..(4): May or may not be conjugated to a chemical probe
RLACGVIGIAQ

SEQ ID NO: 6532 - protein, 30 aa, Homo sapiens; identical to SEQ ID NO: 4496
  Table 4 sequence identifier: Q92616_C1362
  MOD_RES (20)..(20): May or may not be conjugated to a chemical probe

SEQ ID NO: 6533 - protein, 25 aa, Homo sapiens
  Table 4 sequence identifier: Q08J23_C321
  MOD_RES (7)..(7): May or may not be conjugated to a chemical probe
RMVYSTCSLNPIEDEAVIASLLEKS

SEQ ID NO: 6534 - protein, 12 aa, Homo sapiens
  Table 4 sequence identifier: Q01518_C416
  MOD_RES (5)..(5): May or may not be conjugated to a chemical probe
KTDGCHAYLSKN

SEQ ID NO: 6535 - protein, 19 aa, Homo sapiens
  Table 4 sequence identifier: P55735_C245
  MOD_RES (7)..(7): May or may not be conjugated to a chemical probe
RVFIWTCDDASSNTWSPKL

SEQ ID NO: 6536 - protein, 10 aa, Homo sapiens
  Table 4 sequence identifier: P08133_C59
  MOD_RES (5)..(5): May or may not be conjugated to a chemical probe
RQEVCQSYKS

SEQ ID NO: 6537 - protein, 15 aa, Homo sapiens
  Table 4 sequence identifier: P62910_C96
  MOD_RES (4)..(4): May or may not be conjugated to a chemical probe
KSYCAEIAHNVSSKN

SEQ ID NO: 6538 - protein, 10 aa, Homo sapiens
  Table 4 sequence identifier: P62306_C66
  MOD_RES (2)..(2): May or may not be conjugated to a chemical probe
RCNNVLYIRG

SEQ ID NO: 6539 - protein, 14 aa, Homo sapiens
  Table 4 sequence identifier: I3L420_C311
  MOD_RES (9)..(9): May or may not be conjugated to a chemical probe
KSFFDNISCDDNRE

SEQ ID NO: 6540 - protein, 14 aa, Homo sapiens
  Table 4 sequence identifier: Q8ND56_C375
  MOD_RES (9)..(9): May or may not be conjugated to a chemical probe
KSFFDNISCDDNRE

SEQ ID NO: 6541 - protein, 12 aa, Homo sapiens
  Table 4 sequence identifier: P57737_C187
  MOD_RES (10)..(10): May or may not be conjugated to a chemical probe
RDGALVGTACKD

SEQ ID NO: 6542 - protein, 34 aa, Homo sapiens
  Table 4 sequence identifier: Q96FS4_C609
  MOD_RES (18)..(18): May or may not be conjugated to a chemical probe
RVAAGAQASGPEGIEVPCLLGISAEALVLVAPRD

SEQ ID NO: 6543 - protein, 37 aa, Homo sapiens
  Table 4 sequence identifier: Q8TD19_C487
  MOD_RES (26)..(26): May or may not be conjugated to a chemical probe
KVAGPEVLEPMQLNFFLSNPVEQVSCGDNHVVVLTRN

SEQ ID NO: 6544 - protein, 17 aa, Homo sapiens
  Table 4 sequence identifier: Q99567_C561
  MOD_RES (10)..(10): May or may not be conjugated to a chemical probe
KDIAPPPEECLQLLSRA

SEQ ID NO: 6545 - protein, 16 aa, Homo sapiens
  Table 4 sequence identifier: P21333_C631
  MOD_RES (12)..(12): May or may not be conjugated to a chemical probe
KIECDDKGDGSCDVRY

SEQ ID NO: 6546 - protein, 14 aa, Homo sapiens
  Table 4 sequence identifier: P26583_C23
  MOD_RES (12)..(12): May or may not be conjugated to a chemical probe
KMSSYAFFVQTCRE

SEQ ID NO: 6547 - protein, 14 aa, Homo sapiens
  Table 4 sequence identifier: P09429_C23
  MOD_RES (12)..(12): May or may not be conjugated to a chemical probe
KMSSYAFFVQTCRE

SEQ ID NO: 6548 - protein, 11 aa, Homo sapiens
  Table 4 sequence identifier: Q99460_C898
  MOD_RES (9)..(9): May or may not be conjugated to a chemical probe
KVLTMPETCRY

SEQ ID NO: 6549 - protein, 23 aa, Homo sapiens
  Table 4 sequence identifier: Q92785_C53
  MOD_RES (16)..(16): May or may not be conjugated to a chemical probe
RLPFLDSQTGVAQSNCYIWMEKR

SEQ ID NO: 6550 - protein, 27 aa, Homo sapiens
  Table 4 sequence identifier: Q16822_C431
  MOD_RES (3)..(3): May or may not be conjugated to a chemical probe
RQCPIMDPAWEAPEGVPIDAIIFGGRR

SEQ ID NO: 6551 - protein, 16 aa, Homo sapiens
  Table 4 sequence identifier: O95671_C441
  MOD_RES (5)..(5): May or may not be conjugated to a chemical probe
KLTACQVATAFNLSRF

SEQ ID NO: 6552 - protein, 17 aa, Homo sapiens
  Table 4 sequence identifier: Q9UGI8_C412
  MOD_RES (11)..(11): May or may not be conjugated to a chemical probe
KFMPVEGMVFCSVECKK

SEQ ID NO: 6553 - protein, 13 aa, Homo sapiens
  Table 4 sequence identifier: Q13574_C905
  MOD_RES (3)..(3): May or may not be conjugated to a chemical probe
KWCFLDATTASRF

SEQ ID NO: 6554 - protein, 17 aa, Homo sapiens
  Table 4 sequence identifier: Q9UGI8_C416
  MOD_RES (15)..(15): May or may not be conjugated to a chemical probe
KFMPVEGMVFCSVECKK

SEQ ID NO: 6555 - protein, 11 aa, Homo sapiens
  Table 4 sequence identifier: Q9NZA1_C191
  MOD_RES (5)..(5): May or may not be conjugated to a chemical probe
KIGNCPFSQRL

SEQ ID NO: 6556 - protein, 11 aa, Homo sapiens
  Table 4 sequence identifier: P43354_C566
  MOD_RES (4)..(4): May or may not be conjugated to a chemical probe
RTLCTQGLQRI

SEQ ID NO: 6557 - protein, 11 aa, Homo sapiens
  Table 4 sequence identifier: P22736_C566
  MOD_RES (4)..(4): May or may not be conjugated to a chemical probe
RTLCTQGLQRI

SEQ ID NO: 6558 - protein, 31 aa, Homo sapiens; identical to SEQ ID NO: 2416
  Table 4 sequence identifier: Q96EP0_C504
  MOD_RES (9)..(9): May or may not be conjugated to a chemical probe

SEQ ID NO: 6559 - protein, 33 aa, Homo sapiens; identical to SEQ ID NO: 1123
  Table 4 sequence identifier: P30048_C229
  MOD_RES (13)..(13): May or may not be conjugated to a chemical probe

SEQ ID NO: 6560 - protein, 32 aa, Homo sapiens; identical to SEQ ID NO: 3492
  Table 4 sequence identifier: P21333_C210
  MOD_RES (15)..(15): May or may not be conjugated to a chemical probe

SEQ ID NO: 6561 - protein, 10 aa, Homo sapiens
  Table 4 sequence identifier: Q08AF3_C627
  MOD_RES (4)..(4): May or may not be conjugated to a chemical probe
KNICQPVTRK

SEQ ID NO: 6562 - protein, 21 aa, Homo sapiens
  Table 4 sequence identifier: Q92608_C465
  MOD_RES (8)..(8): May or may not be conjugated to a chemical probe
KTLPNAICVGAGDKPMNEYRS

SEQ ID NO: 6563 - protein, 12 aa, Homo sapiens
  Table 4 sequence identifier: O75592_C1868
  MOD_RES (9)..(9): May or may not be conjugated to a chemical probe
KANEEDKNCSRA

SEQ ID NO: 6564 - protein, 32 aa, Homo sapiens; identical to SEQ ID NO: 3492
  Table 4 sequence identifier: P21333_C205
  MOD_RES (10)..(10): May or may not be conjugated to a chemical probe

SEQ ID NO: 6565 - protein, 37 aa, Homo sapiens
  Table 4 sequence identifier: P21333_C2160
  MOD_RES (12)..(12): May or may not be conjugated to a chemical probe
RAPSVANVGSHCDLSLKIPEISIQDMTAQVTSPSGKT

SEQ ID NO: 6566 - protein, 22 aa, Homo sapiens
  Table 4 sequence identifier: P30626_C57
  MOD_RES (2)..(2): May or may not be conjugated to a chemical probe
RCLTQSGIAGGYKPFNLETCRL

SEQ ID NO: 6567 - protein, 14 aa, Homo sapiens
  Table 4 sequence identifier: Q9P2T1_C348
  MOD_RES (14)..(14): May or may not be conjugated to a chemical probe
RVTQQVNPIFSEAC

SEQ ID NO: 6568 - protein, 11 aa, Homo sapiens
  Table 4 sequence identifier: Q52LJ0_C295
  MOD_RES (6)..(6): May or may not be conjugated to a chemical probe
REKTACAINKV

SEQ ID NO: 6569 - protein, 9 aa, Homo sapiens
  Table 4 sequence identifier: Q13813_C956
  MOD_RES (7)..(7): May or may not be conjugated to a chemical probe
REQAQSCRQ

SEQ ID NO: 6570 - protein, 11 aa, Homo sapiens
  Table 4 sequence identifier: Q8NCA5_C293
  MOD_RES (6)..(6): May or may not be conjugated to a chemical probe
REKTACAINKV

SEQ ID NO: 6571 - protein, 21 aa, Homo sapiens
  Table 4 sequence identifier: Q96G03_C573
  MOD_RES (7)..(7): May or may not be conjugated to a chemical probe
KYYAELCAPPGNSDPEQLKKE

SEQ ID NO: 6572 - protein, 23 aa, Homo sapiens
  Table 4 sequence identifier: O75832_C107
  MOD_RES (13)..(13): May or may not be conjugated to a chemical probe
KGAQVNAVNQNGCTPLHYAASKN

SEQ ID NO: 6573 - protein, 20 aa, Homo sapiens
  Table 4 sequence identifier: O95372_C213
  MOD_RES (11)..(11): May or may not be conjugated to a chemical probe
KTYPGVMHSSCPQEMAAVKE

SEQ ID NO: 6574 - protein, 27 aa, Homo sapiens
  Table 4 sequence identifier: Q5JVS0_C22
  MOD_RES (21)..(21): May or may not be conjugated to a chemical probe
KGALGSPVAAAGAAMQESFGCVVANRF

SEQ ID NO: 6575 - protein, 19 aa, Homo sapiens
  Table 4 sequence identifier: Q9BPZ7_C149
  MOD_RES (5)..(5): May or may not be conjugated to a chemical probe
RLEQCPLQLNNPFNEYSKF

SEQ ID NO: 6576 - protein, 13 aa, Homo sapiens
  Table 4 sequence identifier: Q8NE71_C655
  MOD_RES (3)..(3): May or may not be conjugated to a chemical probe
RICIVGPNGVGKS

SEQ ID NO: 6577 - protein, 17 aa, Homo sapiens
  Table 4 sequence identifier: P48059_C100
  MOD_RES (5)..(5): May or may not be conjugated to a chemical probe
RCDLCQEVLADIGFVKN

SEQ ID NO: 6578 - protein, 44 aa, Homo sapiens; identical to SEQ ID NO: 3019
  Table 4 sequence identifier: Q13263_C83
  MOD_RES (5)..(5): May or may not be conjugated to a chemical probe

SEQ ID NO: 6579 - protein, 44 aa, Homo sapiens; identical to SEQ ID NO: 3019
  Table 4 sequence identifier: Q13263_C88
  MOD_RES (10)..(10): May or may not be conjugated to a chemical probe

SEQ ID NO: 6580 - protein, 44 aa, Homo sapiens; identical to SEQ ID NO: 3019
  Table 4 sequence identifier: Q13263_C91
  MOD_RES (13)..(13): May or may not be conjugated to a chemical probe

SEQ ID NO: 6581 - protein, 16 aa, Homo sapiens
  Table 4 sequence identifier: Q9Y4H4_C116
  MOD_RES (13)..(13): May or may not be conjugated to a chemical probe
REQLYSTILSHQCQRM

SEQ ID NO: 6582 - protein, 24 aa, Homo sapiens
  Table 4 sequence identifier: O00139_C537
  MOD_RES (15)..(15): May or may not be conjugated to a chemical probe
RTCMIATISPGMASCENTLNTLRY

SEQ ID NO: 6583 - protein, 11 aa, Homo sapiens
  Table 4 sequence identifier: A6NHR9_C897
  MOD_RES (7)..(7): May or may not be conjugated to a chemical probe
KGPVNSCQGKN

SEQ ID NO: 6584 - protein, 24 aa, Homo sapiens
  Table 4 sequence identifier: Q12824_C350
  MOD_RES (10)..(10): May or may not be conjugated to a chemical probe
RNTGDADQWCPLLETLTDAEMEKK

SEQ ID NO: 6585 - protein, 12 aa, Homo sapiens
  Table 4 sequence identifier: Q96EP5_C85
  MOD_RES (8)..(8): May or may not be conjugated to a chemical probe
RNIDPKPCTPRG

SEQ ID NO: 6586 - protein, 21 aa, Homo sapiens
  Table 4 sequence identifier: Q96ME7_C413
  MOD_RES (9)..(9): May or may not be conjugated to a chemical probe
RIQCPNQGCEAVYSSVSGLKA

SEQ ID NO: 6587 - protein, 13 aa, Homo sapiens
  Table 4 sequence identifier: Q13813_C1622
  MOD_RES (4)..(4): May or may not be conjugated to a chemical probe
RGACAGSEDAVKA

SEQ ID NO: 6588 - protein, 18 aa, Homo sapiens
  Table 4 sequence identifier: Q8WWQ0_C28
  MOD_RES (8)..(8): May or may not be conjugated to a chemical probe
RFLEDGPCQQAAQVLIRE

SEQ ID NO: 6589 - protein, 9 aa, Homo sapiens
  Table 4 sequence identifier: P22736_C303
  MOD_RES (4)..(4): May or may not be conjugated to a chemical probe
KYICLANKD

SEQ ID NO: 6590 - protein, 18 aa, Homo sapiens
  Table 4 sequence identifier: Q9P2N6_C459
  MOD_RES (2)..(2): May or may not be conjugated to a chemical probe
RCIQDEIVDFLTGVLTRA

SEQ ID NO: 6591 - protein, 17 aa, Homo sapiens
  Table 4 sequence identifier: Q93084_C447
  MOD_RES (12)..(12): May or may not be conjugated to a chemical probe
KVGEATETALTCLVEKM

SEQ ID NO: 6592 - protein, 9 aa, Homo sapiens
  Table 4 sequence identifier: Q92945_C436
  MOD_RES (2)..(2): May or may not be conjugated to a chemical probe
KCGLVIGRG

SEQ ID NO: 6593 - protein, 15 aa, Homo sapiens
  Table 4 sequence identifier: O75643_C1278
  MOD_RES (5)..(5): May or may not be conjugated to a chemical probe
RWLSCETQLPVSFRH

SEQ ID NO: 6594 - protein, 18 aa, Homo sapiens
  Table 4 sequence identifier: P14866_C260
  MOD_RES (13)..(13): May or may not be conjugated to a chemical probe
KASLNGADIYSGCCTLKI

SEQ ID NO: 6595 - protein, 11 aa, Homo sapiens
  Table 4 sequence identifier: H7BZ11_C83
  MOD_RES (4)..(4): May or may not be conjugated to a chemical probe
RLECVEPNCRS

SEQ ID NO: 6596 - protein, 11 aa, Homo sapiens
  Table 4 sequence identifier: H7BZ11_C88
  MOD_RES (9)..(9): May or may not be conjugated to a chemical probe
RLECVEPNCRS

SEQ ID NO: 6597 - protein, 11 aa, Homo sapiens
  Table 4 sequence identifier: Q969Q0_C72
  MOD_RES (4)..(4): May or may not be conjugated to a chemical probe
RLECVEPNCRS

SEQ ID NO: 6598 - protein, 11 aa, Homo sapiens
  Table 4 sequence identifier: Q969Q0_C77
  MOD_RES (9)..(9): May or may not be conjugated to a chemical probe
RLECVEPNCRS

SEQ ID NO: 6599 - protein, 18 aa, Homo sapiens
  Table 4 sequence identifier: P14866_C261
  MOD_RES (14)..(14): May or may not be conjugated to a chemical probe
KASLNGADIYSGCCTLKI

SEQ ID NO: 6600 - protein, 16 aa, Homo sapiens
  Table 4 sequence identifier: P15927_C219
  MOD_RES (3)..(3): May or may not be conjugated to a chemical probe
KACPRPEGLNFQDLKN

SEQ ID NO: 6601 - protein, 27 aa, Homo sapiens
  Table 4 sequence identifier: Q92598_C290
  MOD_RES (16)..(16): May or may not be conjugated to a chemical probe
KLMSSNSTDLPLNIECFMNDKDVSGKM

SEQ ID NO: 6602 - protein, 31 aa, Homo sapiens; identical to SEQ ID NO: 885
  Table 4 sequence identifier: P22307_C71
  MOD_RES (27)..(27): May or may not be conjugated to a chemical probe

SEQ ID NO: 6603 - protein, 9 aa, Homo sapiens
  Table 4 sequence identifier: P26358_C896
  MOD_RES (6)..(6): May or may not be conjugated to a chemical probe
KFCVSCARL

SEQ ID NO: 6604 - protein, 24 aa, Homo sapiens
  Table 4 sequence identifier: Q06830_C173
  MOD_RES (6)..(6): May or may not be conjugated to a chemical probe
KHGEVCPAGWKPGSDTIKPDVQKS

SEQ ID NO: 6605 - protein, 29 aa, Homo sapiens
  Table 4 sequence identifier: P42765_C287
  MOD_RES (10)..(10): May or may not be conjugated to a chemical probe
RIVGYFVSGCDPSIMGIGPVPAISGALKK

SEQ ID NO: 6606 - protein, 28 aa, Homo sapiens
  Table 4 sequence identifier: O75592_C2163
  MOD_RES (26)..(26): May or may not be conjugated to a chemical probe
KDLALPIGNELEEDLEILEEAALQVCKT

SEQ ID NO: 6607 - protein, 27 aa, Homo sapiens
  Table 4 sequence identifier: Q9Y4W2_C504
  MOD_RES (3)..(3): May or may not be conjugated to a chemical probe
RICSIYTQSGENSLVQEGSEASPIGKS

SEQ ID NO: 6608 - protein, 12 aa, Homo sapiens
  Table 4 sequence identifier: A6NHR9_C1856
  MOD_RES (5)..(5): May or may not be conjugated to a chemical probe
KITHCPTLLTRD

SEQ ID NO: 6609 - protein, 21 aa, Homo sapiens
  Table 4 sequence identifier: O75351_C240
  MOD_RES (17)..(17): May or may not be conjugated to a chemical probe
RENKPSIIFIDEIDSLCGSRS

SEQ ID NO: 6610 - protein, 23 aa, Homo sapiens
  Table 4 sequence identifier: P52333_C811
  MOD_RES (13)..(13): May or may not be conjugated to a chemical probe
RDGLWNGAQLYACQDPTIFEERH

SEQ ID NO: 6611 - protein, 16 aa, Homo sapiens
  Table 4 sequence identifier: P52564_C216
  MOD_RES (7)..(7): May or may not be conjugated to a chemical probe
KTIDAGCKPYMAPERI

SEQ ID NO: 6612 - protein, 18 aa, Homo sapiens
  Table 4 sequence identifier: P31146_C40
  MOD_RES (12)..(12): May or may not be conjugated to a chemical probe
RVSQTTWDSGFCAVNPKF

SEQ ID NO: 6613 - protein, 14 aa, Homo sapiens
  Table 4 sequence identifier: P55072_C522
  MOD_RES (11)..(11): May or may not be conjugated to a chemical probe
KGVLFYGPPGCGKT

SEQ ID NO: 6614 - protein, 23 aa, Homo sapiens
  Table 4 sequence identifier: P21333_C2293
  MOD_RES (5)..(5): May or may not be conjugated to a chemical probe
KDGSCGVAYVVQEPGDYEVSVKF

SEQ ID NO: 6615 - protein, 34 aa, Homo sapiens; identical to SEQ ID NO: 1789
  Table 4 sequence identifier: Q15233_C208
  MOD_RES (2)..(2): May or may not be conjugated to a chemical probe

SEQ ID NO: 6616 - protein, 32 aa, Homo sapiens; identical to SEQ ID NO: 1532
  Table 4 sequence identifier: P00492_C23
  MOD_RES (20)..(20): May or may not be conjugated to a chemical probe

SEQ ID NO: 6617 - protein, 22 aa, Homo sapiens
  Table 4 sequence identifier: O94804_C873
  MOD_RES (7)..(7): May or may not be conjugated to a chemical probe
RDMLAQCESNMSELQQLQNEKC

SEQ ID NO: 6618 - protein, 13 aa, Homo sapiens
  Table 4 sequence identifier: P36578_C96
  MOD_RES (11)..(11): May or may not be conjugated to a chemical probe
RSGQGAFGNMCRG

SEQ ID NO: 6619 - protein, 14 aa, Homo sapiens
  Table 4 sequence identifier: P28838_C462
  MOD_RES (6)..(6): May or may not be conjugated to a chemical probe
RSAGACTAAAFLKE

SEQ ID NO: 6620 - protein, 17 aa, Homo sapiens
  Table 4 sequence identifier: P52272_C676
  MOD_RES (7)..(7): May or may not be conjugated to a chemical probe
KDKFNECGHVLYADIKM

SEQ ID NO: 6621 - protein, 16 aa, Homo sapiens
  Table 4 sequence identifier: Q08AF3_C489
  MOD_RES (3)..(3): May or may not be conjugated to a chemical probe
RLCITPLVCVLNSDRK

SEQ ID NO: 6622 - protein, 10 aa, Homo sapiens
  Table 4 sequence identifier: Q9Y383_C59
  MOD_RES (7)..(7): May or may not be conjugated to a chemical probe
RMDLGECLKV

SEQ ID NO: 6623 - protein, 19 aa, Homo sapiens
  Table 4 sequence identifier: Q9NZ09_C45
  MOD_RES (13)..(13): May or may not be conjugated to a chemical probe
KVGLPIGFSLPDCLQVVRE

SEQ ID NO: 6624 - protein, 20 aa, Homo sapiens
  Table 4 sequence identifier: Q14152_C404
  MOD_RES (17)..(17): May or may not be conjugated to a chemical probe
KDLYNWLEVEFNPLKLCERV

SEQ ID NO: 6625 - protein, 13 aa, Homo sapiens
  Table 4 sequence identifier: Q99496_C72
  MOD_RES (3)..(3): May or may not be conjugated to a chemical probe
RFCADCIITALRS

SEQ ID NO: 6626 - protein, 24 aa, Homo sapiens
  Table 4 sequence identifier: P30086_C133
  MOD_RES (15)..(15): May or may not be conjugated to a chemical probe
RYVWLVYEQDRPLKCDEPILSNRS

SEQ ID NO: 6627 - protein, 15 aa, Homo sapiens
  Table 4 sequence identifier: Q93009_C90
  MOD_RES (11)..(11): May or may not be conjugated to a chemical probe
RLSESVLSPPCFVRN

SEQ ID NO: 6628 - protein, 10 aa, Homo sapiens
  Table 4 sequence identifier: P83731_C36
  MOD_RES (2)..(2): May or may not be conjugated to a chemical probe
KCESAFLSKR

SEQ ID NO: 6629 - protein, 12 aa, Homo sapiens
  Table 4 sequence identifier: P83731_C6
  MOD_RES (5)..(5): May or may not be conjugated to a chemical probe
KVELCSFSGYKI

SEQ ID NO: 6630 - protein, 18 aa, Homo sapiens
  Table 4 sequence identifier: Q92499_C110
  MOD_RES (13)..(13): May or may not be conjugated to a chemical probe
RGSAFAIGSDGLCCQSRE

SEQ ID NO: 6631 - protein, 19 aa, Homo sapiens
  Table 4 sequence identifier: A6NHR9_C492
  MOD_RES (14)..(14): May or may not be conjugated to a chemical probe
RLIPYTSVEDFDWCTPPKK

SEQ ID NO: 6632 - protein, 30 aa, Homo sapiens; identical to SEQ ID NO: 1272
  Table 4 sequence identifier: P34932_C290
  MOD_RES (16)..(16): May or may not be conjugated to a chemical probe

SEQ ID NO: 6633 - protein, 19 aa, Homo sapiens
  Table 4 sequence identifier: Q9H4B7_C12
  MOD_RES (11)..(11): May or may not be conjugated to a chemical probe
REIVHIQIGQCGNQIGAKF

SEQ ID NO: 6634 - protein, 18 aa, Homo sapiens
  Table 4 sequence identifier: Q6PJG6_C326
  MOD_RES (14)..(14): May or may not be conjugated to a chemical probe
RTQAFQVLLQPLACVLKA

SEQ ID NO: 6635 - protein, 20 aa, Homo sapiens
  Table 4 sequence identifier: Q9NZ08_C486
  MOD_RES (13)..(13): May or may not be conjugated to a chemical probe
KNEDLWDSMASICPTDGVKG

SEQ ID NO: 6636 - protein, 10 aa, Homo sapiens
  Table 4 sequence identifier: Q5VZF2_C19
  MOD_RES (8)..(8): May or may not be conjugated to a chemical probe
KWLTLEVCRQ

SEQ ID NO: 6637 - protein, 10 aa, Homo sapiens
  Table 4 sequence identifier: Q9NR56_C19
  MOD_RES (8)..(8): May or may not be conjugated to a chemical probe
KWLTLEVCRE

SEQ ID NO: 6638 - protein, 13 aa, Homo sapiens
  Table 4 sequence identifier: P55263_C353
  MOD_RES (4)..(4): May or may not be conjugated to a chemical probe
RTGCTFPEKPDFH

SEQ ID NO: 6639 - protein, 20 aa, Homo sapiens
  Table 4 sequence identifier: Q8WUM4_C40
  MOD_RES (18)..(18): May or may not be conjugated to a chemical probe
KFIQQTYPSGGEEQAQYCRA

SEQ ID NO: 6640 - protein, 23 aa, Homo sapiens
  Table 4 sequence identifier: P50579_C121
  MOD_RES (12)..(12): May or may not be conjugated to a chemical probe
KVQTDPPSVPICDLYPNGVFPKG

SEQ ID NO: 6641 - protein, 10 aa, Homo sapiens
  Table 4 sequence identifier: P21333_C1165
  MOD_RES (2)..(2): May or may not be conjugated to a chemical probe
KCSGPGLERA

SEQ ID NO: 6642 - protein, 12 aa, Homo sapiens
  Table 4 sequence identifier: Q2M2I8_C288
  MOD_RES (8)..(8): May or may not be conjugated to a chemical probe
RYSQDMHCLIRY

SEQ ID NO: 6643 - protein, 22 aa, Homo sapiens
  Table 4 sequence identifier: Q8N0W3_C484
  MOD_RES (16)..(16): May or may not be conjugated to a chemical probe
RAWDLWDPETLPAEYCLPSARL

SEQ ID NO: 6644 - protein, 20 aa, Homo sapiens
  Table 4 sequence identifier: P18621_C144
  MOD_RES (10)..(10): May or may not be conjugated to a chemical probe
RINPYMSSPCHIEMILTEKE

SEQ ID NO: 6645 - protein, 20 aa, Homo sapiens
  Table 4 sequence identifier: J3QL51_C144
  MOD_RES (10)..(10): May or may not be conjugated to a chemical probe
RINPYMSSPCHIEMILTEKE

SEQ ID NO: 6646 - protein, 11 aa, Homo sapiens
  Table 4 sequence identifier: Q12906_C203
  MOD_RES (2)..(2): May or may not be conjugated to a chemical probe
KCLAALASLRH

SEQ ID NO: 6647 - protein, 12 aa, Homo sapiens
  Table 4 sequence identifier: Q8N163_C754
  MOD_RES (8)..(8): May or may not be conjugated to a chemical probe
RVVTQNICQYRS

SEQ ID NO: 6648 - protein, 22 aa, Homo sapiens
  Table 4 sequence identifier: Q6P1R4_C213
  MOD_RES (15)..(15): May or may not be conjugated to a chemical probe
KAVAIPVFANGNIQCLQDVERC

SEQ ID NO: 6649 - protein, 11 aa, Homo sapiens
  Table 4 sequence identifier: Q9Y490_C2196
  MOD_RES (9)..(9): May or may not be conjugated to a chemical probe
KAVAAGNSCRQ

SEQ ID NO: 6650 - protein, 26 aa, Homo sapiens
  Table 4 sequence identifier: Q92947_C176
  MOD_RES (7)..(7): May or may not be conjugated to a chemical probe
KGELLGCFGLTEPNSGSDPSSMETRA

SEQ ID NO: 6651 - protein, 14 aa, Homo sapiens
  Table 4 sequence identifier: P21333_C1453
  MOD_RES (2)..(2): May or may not be conjugated to a chemical probe
KCSGPGLSPGMVRA

SEQ ID NO: 6652 - protein, 29 aa, Homo sapiens
  Table 4 sequence identifier: P49411_C147
  MOD_RES (13)..(13): May or may not be conjugated to a chemical probe
KNMITGTAPLDGCILVVAANDGPMPQTRE

SEQ ID NO: 6653 - protein, 16 aa, Homo sapiens
  Table 4 sequence identifier: Q9BV38_C384
  MOD_RES (10)..(10): May or may not be conjugated to a chemical probe
RTEQLQAVLCSTMEKS

SEQ ID NO: 6654 - protein, 24 aa, Homo sapiens
  Table 4 sequence identifier: Q93008_C1566
  MOD_RES (7)..(7): May or may not be conjugated to a chemical probe
KNAGATCYMNSVIQQLYMIPSIRN

SEQ ID NO: 6655 - protein, 24 aa, Homo sapiens
  Table 4 sequence identifier: O00507_C1568
  MOD_RES (7)..(7): May or may not be conjugated to a chemical probe
KNAGATCYMNSVIQQLYMIPSIRN

SEQ ID NO: 6656 - protein, 27 aa, Homo sapiens
  Table 4 sequence identifier: Q9BXL7_C1115
  MOD_RES (8)..(8): May or may not be conjugated to a chemical probe
KELEALPCLYATVEPDMWGSVEELLRV

SEQ ID NO: 6657 - protein, 18 aa, Homo sapiens
  Table 4 sequence identifier: Q9P2J5_C573
  MOD_RES (15)..(15): May or may not be conjugated to a chemical probe
RNFEATLGWLQEHACSRT

SEQ ID NO: 6658 - protein, 17 aa, Homo sapiens
  Table 4 sequence identifier: O00541_C391
  MOD_RES (2)..(2): May or may not be conjugated to a chemical probe
RCYVQPQWVFDSVNARL

SEQ ID NO: 6659 - protein, 18 aa, Homo sapiens
  Table 4 sequence identifier: Q9Y228_C388
  MOD_RES (4)..(4): May or may not be conjugated to a chemical probe
RDLCSLDTQDLQDQLKRS

SEQ ID NO: 6660 - protein, 20 aa, Homo sapiens
  Table 4 sequence identifier: O95747_C191
  MOD_RES (8)..(8): May or may not be conjugated to a chemical probe
KTFVGTPCWMAPEVMEQVRG

SEQ ID NO: 6661 - protein, 20 aa, Homo sapiens
  Table 4 sequence identifier: Q9UEW8_C237
  MOD_RES (8)..(8): May or may not be conjugated to a chemical probe
KTFVGTPCWMAPEVMEQVRG

SEQ ID NO: 6662 - protein, 23 aa, Homo sapiens
  Table 4 sequence identifier: Q8IVH4_C184
  MOD_RES (12)..(12): May or may not be conjugated to a chemical probe
KLSVLAVDPSSCTSGGSLLGDKT

SEQ ID NO: 6663 - protein, 14 aa, Homo sapiens
  Table 4 sequence identifier: P49189_C484
  MOD_RES (4)..(4): May or may not be conjugated to a chemical probe
KTVCVEMGDVESAF

SEQ ID NO: 6664 - protein, 22 aa, Homo sapiens
  Table 4 sequence identifier: P08238_C521
  MOD_RES (16)..(16): May or may not be conjugated to a chemical probe
RGFEVVYMTEPIDEYCVQQLKE

SEQ ID NO: 6665 - protein, 26 aa, Homo sapiens
  Table 4 sequence identifier: Q8TDP1_C34
  MOD_RES (13)..(13): May or may not be conjugated to a chemical probe
RDAVPATLHLLPCEVAVDGPAPVGRF

SEQ ID NO: 6666 - protein, 15 aa, Homo sapiens
  Table 4 sequence identifier: P08575_C760
  MOD_RES (2)..(2): May or may not be conjugated to a chemical probe
KCAEYWPSMEEGTRA

SEQ ID NO: 6667 - protein, 22 aa, Homo sapiens
  Table 4 sequence identifier: I3L3Q1_C558
  MOD_RES (6)..(6): May or may not be conjugated to a chemical probe
RAVESCPDEEEGPFSLPEEERK

SEQ ID NO: 6668 - protein, 22 aa, Homo sapiens
  Table 4 sequence identifier: Q6ZSZ5_C600
  MOD_RES (6)..(6): May or may not be conjugated to a chemical probe
RAVESCPDEEEGPFSLPEEERK

SEQ ID NO: 6669 - protein, 23 aa, Homo sapiens
  Table 4 sequence identifier: Q9Y490_C1661
  MOD_RES (10)..(10): May or may not be conjugated to a chemical probe
RDKAPGQLECETAIAALNSCLRD

SEQ ID NO: 6670 - protein, 23 aa, Homo sapiens
  Table 4 sequence identifier: Q9Y490_C1671
  MOD_RES (20)..(20): May or may not be conjugated to a chemical probe
RDKAPGQLECETAIAALNSCLRD

SEQ ID NO: 6671 - protein, 19 aa, Homo sapiens
  Table 4 sequence identifier: P53384_C235
  MOD_RES (16)..(16): May or may not be conjugated to a chemical probe
KLPIIGVVENMSGFICPKC

SEQ ID NO: 6672 - protein, 25 aa, Homo sapiens
  Table 4 sequence identifier: P49589_C204
  MOD_RES (14)..(14): May or may not be conjugated to a chemical probe
KDLLSDWLDSTLGCDVTDNSIFSKL

SEQ ID NO: 6673 - protein, 20 aa, Homo sapiens
  Table 4 sequence identifier: P78527_C2469
  MOD_RES (18)..(18): May or may not be conjugated to a chemical probe
RELLNPVVEFVSHPSTTCRE

SEQ ID NO: 6674 - protein, 20 aa, Homo sapiens
  Table 4 sequence identifier: Q9P2R3_C460
  MOD_RES (15)..(15): May or may not be conjugated to a chemical probe
RGSHTDAPDTATGNCLLQRA

SEQ ID NO: 6675 - protein, 10 aa, Homo sapiens
  Table 4 sequence identifier: P33316_C222
  MOD_RES (7)..(7): May or may not be conjugated to a chemical probe
RIAQLICERI

SEQ ID NO: 6676 - protein, 15 aa, Homo sapiens
  Table 4 sequence identifier: E9PMF8_C694
  MOD_RES (2)..(2): May or may not be conjugated to a chemical probe
KCAEYWPSMEEGTRA

SEQ ID NO: 6677 - protein, 11 aa, Homo sapiens
  Table 4 sequence identifier: P49773_C84
  MOD_RES (2)..(2): May or may not be conjugated to a chemical probe
KCAADLGLNKG

SEQ ID NO: 6678 - protein, 12 aa, Homo sapiens
  Table 4 sequence identifier: Q9BRZ2_C514
  MOD_RES (6)..(6): May or may not be conjugated to a chemical probe
RITGLCPFGPRE

SEQ ID NO: 6679 - protein, 23 aa, Homo sapiens
  Table 4 sequence identifier: P35754_C83
  MOD_RES (7)..(7): May or may not be conjugated to a chemical probe
KDCIGGCSDLVSLQQSGELLTRL

SEQ ID NO: 6680 - protein, 23 aa, Homo sapiens
  Table 4 sequence identifier: Q9Y490_C1353
  MOD_RES (14)..(14): May or may not be conjugated to a chemical probe
RAVTDSINQLITMCTQQAPGQKE

SEQ ID NO: 6681 - protein, 21 aa, Homo sapiens
  Table 4 sequence identifier: P61981_C97
  MOD_RES (7)..(7): May or may not be conjugated to a chemical probe
KELEAVCQDVLSLLDNYLIKN

SEQ ID NO: 6682 - protein, 16 aa, Homo sapiens
  Table 4 sequence identifier: Q15020_C341
  MOD_RES (7)..(7): May or may not be conjugated to a chemical probe
RALVENCLVPDLWIRY

SEQ ID NO: 6683 - protein, 19 aa, Homo sapiens
  Table 4 sequence identifier: O60711_C199
  MOD_RES (7)..(7): May or may not be conjugated to a chemical probe
RSGLAYCPNDYHQLFSPRC

SEQ ID NO: 6684 - protein, 27 aa, Homo sapiens
  Table 4 sequence identifier: Q9ULT8_C2415
  MOD_RES (22)..(22): May or may not be conjugated to a chemical probe
KNPSGSGPPLSIEDLGLNFQFCPSSRI

SEQ ID NO: 6685 - protein, 23 aa, Homo sapiens
  Table 4 sequence identifier: Q99757_C90
  MOD_RES (18)..(18): May or may not be conjugated to a chemical probe
RVVNSETPVVVDFHAQWCGPCKI

SEQ ID NO: 6686 - protein, 23 aa, Homo sapiens
  Table 4 sequence identifier: Q99757_C93
  MOD_RES (21)..(21): May or may not be conjugated to a chemical probe
RVVNSETPVVVDFHAQWCGPCKI

SEQ ID NO: 6687 - protein, 35 aa, Homo sapiens; identical to SEQ ID NO: 1235
  Table 4 sequence identifier: Q13363_C134
  MOD_RES (27)..(27): May or may not be conjugated to a chemical probe

SEQ ID NO: 6688 - protein, 19 aa, Homo sapiens
  Table 4 sequence identifier: O95571_C34
  MOD_RES (9)..(9): May or may not be conjugated to a chemical probe
RQMFEPVSCTFTYLLGDRE

SEQ ID NO: 6689 - protein, 32 aa, Homo sapiens; identical to SEQ ID NO: 3747
  Table 4 sequence identifier: P31040_C311
  MOD_RES (30)..(30): May or may not be conjugated to a chemical probe

SEQ ID NO: 6690 - protein, 10 aa, Homo sapiens
  Table 4 sequence identifier: P29466_C285
  MOD_RES (8)..(8): May or may not be conjugated to a chemical probe
KVIIIQACRG

SEQ ID NO: 6691 - protein, 14 aa, Homo sapiens
  Table 4 sequence identifier: Q9Y4F9_C35
  MOD_RES (2)..(2): May or may not be conjugated to a chemical probe
RCNSFIENSSALKK

SEQ ID NO: 6692 - protein, 23 aa, Homo sapiens
  Table 4 sequence identifier: P35754_C79
  MOD_RES (3)..(3): May or may not be conjugated to a chemical probe
KDCIGGCSDLVSLQQSGELLTRL

SEQ ID NO: 6693 - protein, 12 aa, Homo sapiens
  Table 4 sequence identifier: Q15149_C950
  MOD_RES (8)..(8): May or may not be conjugated to a chemical probe
RLPLLAVCDYKQ

SEQ ID NO: 6694 - protein, 15 aa, Homo sapiens
  Table 4 sequence identifier: Q13642_C71
  MOD_RES (2)..(2): May or may not be conjugated to a chemical probe
KCLHPLANETFVAKD

SEQ ID NO: 6695 - protein, 11 aa, Homo sapiens
  Table 4 sequence identifier: Q00610_C753
  MOD_RES (5)..(5): May or may not be conjugated to a chemical probe
RESNCYDPERV

SEQ ID NO: 6696 - protein, 31 aa, Homo sapiens; identical to SEQ ID NO: 1280
  Table 4 sequence identifier: Q15365_C293
  MOD_RES (26)..(26): May or may not be conjugated to a chemical probe

SEQ ID NO: 6697 - protein, 13 aa, Homo sapiens
  Table 4 sequence identifier: P39023_C253
  MOD_RES (4)..(4): May or may not be conjugated to a chemical probe
KVACIGAWHPARV

SEQ ID NO: 6698 - protein, 11 aa, Homo sapiens
  Table 4 sequence identifier: Q96QR8_C238
  MOD_RES (8)..(8): May or may not be conjugated to a chemical probe
RFFFDVGCNKY

SEQ ID NO: 6699 - protein, 11 aa, Homo sapiens
  Table 4 sequence identifier: P29590_C60
  MOD_RES (5)..(5): May or may not be conjugated to a chemical probe
RCQQCQAEAKC

SEQ ID NO: 6700 - protein, 11 aa, Homo sapiens
  Table 4 sequence identifier: P07814_C1497
  MOD_RES (4)..(4): May or may not be conjugated to a chemical probe
KCVCGKNPAKY

SEQ ID NO: 6701 - protein, 28 aa, Homo sapiens
  Table 4 sequence identifier: Q9BYW2_C667
  MOD_RES (4)..(4): May or may not be conjugated to a chemical probe
RSFCPIELNINGSPGAESDLATFCTSKT

SEQ ID NO: 6702 - protein, 18 aa, Homo sapiens
  Table 4 sequence identifier: Q13469_C569
  MOD_RES (14)..(14): May or may not be conjugated to a chemical probe
RIVSLQTASNPIECSQRS

SEQ ID NO: 6703 - protein, 32 aa, Homo sapiens; identical to SEQ ID NO: 3747
  Table 4 sequence identifier: P31040_C305
  MOD_RES (24)..(24): May or may not be conjugated to a chemical probe

SEQ ID NO: 6704 - protein, 13 aa, Homo sapiens
  Table 4 sequence identifier: P40939_C550
  MOD_RES (2)..(2): May or may not be conjugated to a chemical probe
RCLAPMMSEVIRI

SEQ ID NO: 6705 - protein, 30 aa, Homo sapiens; identical to SEQ ID NO: 1045
  Table 4 sequence identifier: P68104_C411
  MOD_RES (17)..(17): May or may not be conjugated to a chemical probe

SEQ ID NO: 6706 - protein, 18 aa, Homo sapiens
  Table 4 sequence identifier: Q15365_C158
  MOD_RES (15)..(15): May or may not be conjugated to a chemical probe
RAITIAGVPQSVTECVKQ

SEQ ID NO: 6707 - protein, 18 aa, Homo sapiens
  Table 4 sequence identifier: P26599_C250
  MOD_RES (13)..(13): May or may not be conjugated to a chemical probe
KLSLDGQNIYNACCTLRI

SEQ ID NO: 6708 - protein, 18 aa, Homo sapiens
  Table 4 sequence identifier: P26599_C251
  MOD_RES (14)..(14): May or may not be conjugated to a chemical probe
KLSLDGQNIYNACCTLRI

SEQ ID NO: 6709 - protein, 20 aa, Homo sapiens
  Table 4 sequence identifier: P10768_C176
  MOD_RES (10)..(10): May or may not be conjugated to a chemical probe
KSVSAFAPICNPVLCPWGKK

SEQ ID NO: 6710 - protein, 20 aa, Homo sapiens
  Table 4 sequence identifier: P10768_C181
  MOD_RES (15)..(15): May or may not be conjugated to a chemical probe
KSVSAFAPICNPVLCPWGKK

SEQ ID NO: 6711 - protein, 20 aa, Homo sapiens
  Table 4 sequence identifier: P30084_C62
  MOD_RES (7)..(7): May or may not be conjugated to a chemical probe
KALNALCDGLIDELNQALKT

SEQ ID NO: 6712 - protein, 19 aa, Homo sapiens
  Table 4 sequence identifier: Q15149_C3336
  MOD_RES (2)..(2): May or may not be conjugated to a chemical probe
RCRPDQLTGLSLLPLSEKA

SEQ ID NO: 6713 - protein, 22 aa, Homo sapiens
  Table 4 sequence identifier: P51610_C149
  MOD_RES (2)..(2): May or may not be conjugated to a chemical probe
KCYLFGGLANDSEDPKNNIPRY

SEQ ID NO: 6714 - protein, 28 aa, Homo sapiens
  Table 4 sequence identifier: Q9BUJ2_C291
  MOD_RES (9)..(9): May or may not be conjugated to a chemical probe
RIGWSLDSCSTQLGEEPFSYGYGGTGKK

SEQ ID NO: 6715 - protein, 18 aa, Homo sapiens
  Table 4 sequence identifier: P11413_C385
  MOD_RES (16)..(16): May or may not be conjugated to a chemical probe
RLQFHDVAGDIFHQQCKR

SEQ ID NO: 6716 - protein, 12 aa, Homo sapiens
  Table 4 sequence identifier: P00488_C410
  MOD_RES (2)..(2): May or may not be conjugated to a chemical probe
RCGPASVQAIKH

SEQ ID NO: 6717 - protein, 17 aa, Homo sapiens
  Table 4 sequence identifier: Q9H8H3_C79
  MOD_RES (9)..(9): May or may not be conjugated to a chemical probe
KLSLLEVGCGTGANFKF

SEQ ID NO: 6718 - protein, 10 aa, Homo sapiens
  Table 4 sequence identifier: Q9NZ08_C498
  MOD_RES (7)..(7): May or may not be conjugated to a chemical probe
KGMDGFCSRS

SEQ ID NO: 6719 - protein, 9 aa, Homo sapiens
  Table 4 sequence identifier: O00303_C256
  MOD_RES (3)..(3): May or may not be conjugated to a chemical probe
KTCFSPNRV

SEQ ID NO: 6720 - protein, 11 aa, Homo sapiens
  Table 4 sequence identifier: O75643_C1127
  MOD_RES (7)..(7): May or may not be conjugated to a chemical probe
RMWQSMCPLRQ

SEQ ID NO: 6721 - protein, 39 aa, Homo sapiens; identical to SEQ ID NO: 5255
  Table 4 sequence identifier: Q5T4S7_C1274
  MOD_RES (27)..(27): May or may not be conjugated to a chemical probe

SEQ ID NO: 6722 - protein, 19 aa, Homo sapiens
  Table 4 sequence identifier: Q14676_C2049
  MOD_RES (13)..(13): May or may not be conjugated to a chemical probe
RVVITCPQDFPHCSIPLRV

SEQ ID NO: 6723 - protein, 12 aa, Homo sapiens
  Table 4 sequence identifier: Q9Y2X3_C205
  MOD_RES (10)..(10): May or may not be conjugated to a chemical probe
KIISDNLTYCKC

SEQ ID NO: 6724 - protein, 25 aa, Homo sapiens
  Table 4 sequence identifier: P31930_C453
  MOD_RES (7)..(7): May or may not be conjugated to a chemical probe
KYIYDQCPAVAGYGPIEQLPDYNRI

SEQ ID NO: 6725 - protein, 18 aa, Homo sapiens
  Table 4 sequence identifier: Q15019_C111
  MOD_RES (16)..(16): May or may not be conjugated to a chemical probe
RLTVVDTPGYGDAINCRD

SEQ ID NO: 6726 - protein, 33 aa, Homo sapiens; identical to SEQ ID NO: 387
  Table 4 sequence identifier: Q15149_C992
  MOD_RES (16)..(16): May or may not be conjugated to a chemical probe

SEQ ID NO: 6727 - protein, 17 aa, Homo sapiens
  Table 4 sequence identifier: Q29RF7_C1079
  MOD_RES (6)..(6): May or may not be conjugated to a chemical probe
KLYTVCDVALCVINSKS

SEQ ID NO: 6728 - protein, 20 aa, Homo sapiens
  Table 4 sequence identifier: Q6P2E9_C976
  MOD_RES (3)..(3): May or may not be conjugated to a chemical probe
RLCTQLEGLQSTVTGHVERA

SEQ ID NO: 6729 - protein, 32 aa, Homo sapiens; identical to SEQ ID NO: 4517
  Table 4 sequence identifier: O00329_C474
  MOD_RES (15)..(15): May or may not be conjugated to a chemical probe

SEQ ID NO: 6730 - protein, 21 aa, Homo sapiens
  Table 4 sequence identifier: P56192_C12
  MOD_RES (11)..(11): May or may not be conjugated to a chemical probe
RLFVSDGVPGCLPVLAAAGRA

SEQ ID NO: 6731 - protein, 23 aa, Homo sapiens
  Table 4 sequence identifier: P28838_C335
  MOD_RES (15)..(15): May or may not be conjugated to a chemical probe
KLNLPINIIGLAPLCENMPSGKA

SEQ ID NO: 6732 - protein, 15 aa, Homo sapiens
  Table 4 sequence identifier: P30876_C1093
  MOD_RES (3)..(3): May or may not be conjugated to a chemical probe
RDCQIAHGAAQFLRE

SEQ ID NO: 6733 - protein, 11 aa, Homo sapiens
  Table 4 sequence identifier: P27635_C195
  MOD_RES (7)..(7): May or may not be conjugated to a chemical probe
RLIPDGCGVKY

SEQ ID NO: 6734 - protein, 29 aa, Homo sapiens
  Table 4 sequence identifier: Q9Y490_C1392
  MOD_RES (19)..(19): May or may not be conjugated to a chemical probe
RELLENPVQPINDMSYFGCLDSVMENSKV

SEQ ID NO: 6735 - protein, 18 aa, Homo sapiens
  Table 4 sequence identifier: P55884_C384
  MOD_RES (15)..(15): May or may not be conjugated to a chemical probe
RFSHQGVQLIDFSPCERY

SEQ ID NO: 6736 - protein, 18 aa, Homo sapiens
  Table 4 sequence identifier: Q9UGI8_C46
  MOD_RES (2)..(2): May or may not be conjugated to a chemical probe
KCGQEEHDVLLSNEEDRK

SEQ ID NO: 6737 - protein, 14 aa, Homo sapiens
  Table 4 sequence identifier: P61978_C184
  MOD_RES (6)..(6): May or may not be conjugated to a chemical probe
KLFQECCPHSTDRV

SEQ ID NO: 6738 - protein, 10 aa, Homo sapiens
  Table 4 sequence identifier: P31943_C122
  MOD_RES (7)..(7): May or may not be conjugated to a chemical probe
RGLPFGCSKE

SEQ ID NO: 6739 - protein, 13 aa, Homo sapiens
  Table 4 sequence identifier: Q63HN8_C4348
  MOD_RES (6)..(6): May or may not be conjugated to a chemical probe
KAVLECKPLGIKT

SEQ ID NO: 6740 - protein, 16 aa, Homo sapiens
  Table 4 sequence identifier: Q9Y490_C956
  MOD_RES (14)..(14): May or may not be conjugated to a chemical probe
KASAGPQPLLVQSCKA

SEQ ID NO: 6741 - protein, 17 aa, Homo sapiens
  Table 4 sequence identifier: P08133_C96
  MOD_RES (13)..(13): May or may not be conjugated to a chemical probe
RLIVGLMRPPAYCDAKE

SEQ ID NO: 6742 - protein, 28 aa, Homo sapiens
  Table 4 sequence identifier: P13667_C206
  MOD_RES (23)..(23): May or may not be conjugated to a chemical probe
KENFDEVVNDADIILVEFYAPWCGHCKK

SEQ ID NO: 6743 - protein, 25 aa, Homo sapiens
  Table 4 sequence identifier: Q7Z434_C33
  MOD_RES (20)..(20): May or may not be conjugated to a chemical probe
RNFSNFCNVDVVEILPYLPCLTARD

SEQ ID NO: 6744 - protein, 24 aa, Homo sapiens
  Table 4 sequence identifier: Q9UKX7_C416
  MOD_RES (21)..(21): May or may not be conjugated to a chemical probe
RADTNLGNILLNVLIPPNMPCTRT

SEQ ID NO: 6745 - protein, 23 aa, Homo sapiens
  Table 4 sequence identifier: Q2M2I8_C319
  MOD_RES (3)..(3): May or may not be conjugated to a chemical probe
KECPIPNVQNSPIPAKLPEPVKA

SEQ ID NO: 6746 - protein, 32 aa, Homo sapiens; identical to SEQ ID NO: 3765
  Table 4 sequence identifier: Q13547_C100
  MOD_RES (8)..(8): May or may not be conjugated to a chemical probe

SEQ ID NO: 6747 - protein, 32 aa, Homo sapiens; identical to SEQ ID NO: 3765
  Table 4 sequence identifier: Q13547_C110
  MOD_RES (18)..(18): May or may not be conjugated to a chemical probe

SEQ ID NO: 6748 - protein, 28 aa, Homo sapiens
  Table 4 sequence identifier: P13667_C209
  MOD_RES (26)..(26): May or may not be conjugated to a chemical probe
KENFDEVVNDADIILVEFYAPWCGHCKK

SEQ ID NO: 6749 - protein, 10 aa, Homo sapiens
  Table 4 sequence identifier: P55795_C122
  MOD_RES (7)..(7): May or may not be conjugated to a chemical probe
RGLPFGCSKE

SEQ ID NO: 6750 - protein, 22 aa, Homo sapiens
  Table 4 sequence identifier: O95544_C79
  MOD_RES (3)..(3): May or may not be conjugated to a chemical probe
KACVLQNPQTIMHIQDPASQRL

SEQ ID NO: 6751 - protein, 20 aa, Homo sapiens
  Table 4 sequence identifier: P62140_C154
  MOD_RES (6)..(6): May or may not be conjugated to a chemical probe
KTFTDCFNCLPIAAIVDEKI

SEQ ID NO: 6752 - protein, 20 aa, Homo sapiens
  Table 4 sequence identifier: P62136_C155
  MOD_RES (6)..(6): May or may not be conjugated to a chemical probe
KTFTDCFNCLPIAAIVDEKI

SEQ ID NO: 6753 - protein, 20 aa, Homo sapiens
  Table 4 sequence identifier: P36873_C155
  MOD_RES (6)..(6): May or may not be conjugated to a chemical probe
KTFTDCFNCLPIAAIVDEKI

SEQ ID NO: 6754 - protein, 18 aa, Homo sapiens
  Table 4 sequence identifier: P53597_C172
  MOD_RES (7)..(7): May or may not be conjugated to a chemical probe
RLIGPNCPGVINPGECKI

SEQ ID NO: 6755 - protein, 9 aa, Homo sapiens
  Table 4 sequence identifier: O95071_C730
  MOD_RES (5)..(5): May or may not be conjugated to a chemical probe
KVPDCFQRT

SEQ ID NO: 6756 - protein, 10 aa, Homo sapiens
  Table 4 sequence identifier: P22314_C632
  MOD_RES (6)..(6): May or may not be conjugated to a chemical probe
KSIPICTLKN

SEQ ID NO: 6757 - protein, 10 aa, Homo sapiens
  Table 4 sequence identifier: Q9UBT2_C173
  MOD_RES (6)..(6): May or may not be conjugated to a chemical probe
RTFPGCTIRN

SEQ ID NO: 6758 - protein, 19 aa, Homo sapiens
  Table 4 sequence identifier: P55072_C572
  MOD_RES (6)..(6): May or may not be conjugated to a chemical probe
RQAAPCVLFFDELDSIAKA

SEQ ID NO: 6759 - protein, 14 aa, Homo sapiens
  Table 4 sequence identifier: O00329_C90
  MOD_RES (3)..(3): May or may not be conjugated to a chemical probe
RLCDVQPFLPVLRL

SEQ ID NO: 6760 - protein, 11 aa, Homo sapiens
  Table 4 sequence identifier: Q9UGI8_C238
  MOD_RES (8)..(8): May or may not be conjugated to a chemical probe
RTQYSCYCCKL

SEQ ID NO: 6761 - protein, 32 aa, Homo sapiens; identical to SEQ ID NO: 2860
  Table 4 sequence identifier: Q14204_C2142
  MOD_RES (25)..(25): May or may not be conjugated to a chemical probe

SEQ ID NO: 6762 - protein, 11 aa, Homo sapiens
  Table 4 sequence identifier: Q9Y692_C113
  MOD_RES (4)..(4): May or may not be conjugated to a chemical probe
KFVCPGINVKC

SEQ ID NO: 6763 - protein, 11 aa, Homo sapiens
  Table 4 sequence identifier: Q9UKD1_C110
  MOD_RES (4)..(4): May or may not be conjugated to a chemical probe
KFVCPGINVKC

SEQ ID NO: 6764 - protein, 14 aa, Homo sapiens
  Table 4 sequence identifier: P43686_C210
  MOD_RES (11)..(11): May or may not be conjugated to a chemical probe
RGVLMYGPPGCGKT

SEQ ID NO: 6765 - protein, 10 aa, Homo sapiens
  Table 4 sequence identifier: O95232_C58
  MOD_RES (7)..(7): May or may not be conjugated to a chemical probe
RSDLGPCEKI

SEQ ID NO: 6766 - protein, 29 aa, Homo sapiens
  Table 4 sequence identifier: P27695_C99
  MOD_RES (2)..(2): May or may not be conjugated to a chemical probe
KCSENKLPAELQELPGLSHQYWSAPSDKE

SEQ ID NO: 6767 - protein, 21 aa, Homo sapiens
  Table 4 sequence identifier: P23743_C432
  MOD_RES (5)..(5): May or may not be conjugated to a chemical probe
RILVCGGDGTVGWILETIDKA

SEQ ID NO: 6768 - protein, 9 aa, Homo sapiens
  Table 4 sequence identifier: Q08J23_C93
  MOD_RES (6)..(6): May or may not be conjugated to a chemical probe
KEILHCLKN

SEQ ID NO: 6769 - protein, 10 aa, Homo sapiens
  Table 4 sequence identifier: Q92616_C1482
  MOD_RES (7)..(7): May or may not be conjugated to a chemical probe
REAADDCAKA

SEQ ID NO: 6770 - protein, 24 aa, Homo sapiens
  Table 4 sequence identifier: Q9Y4B6_C1227
  MOD_RES (3)..(3): May or may not be conjugated to a chemical probe
RNCATFNPTDDLVLNDGVLWDVRS

SEQ ID NO: 6771 - protein, 18 aa, Homo sapiens
  Table 4 sequence identifier: Q9Y6D5_C1450
  MOD_RES (6)..(6): May or may not be conjugated to a chemical probe
RSGTNCLENLVISNGEKF

SEQ ID NO: 6772 - protein, 13 aa, Homo sapiens
  Table 4 sequence identifier: Q6F5E8_C698
  MOD_RES (9)..(9): May or may not be conjugated to a chemical probe
RAVHQIQACLLRN

SEQ ID NO: 6773 - protein, 29 aa, Homo sapiens
  Table 4 sequence identifier: P21964_C119
  MOD_RES (22)..(22): May or may not be conjugated to a chemical probe
KIVDAVIQEHQPSVLLELGAYCGYSAVRM

SEQ ID NO: 6774 - protein, 19 aa, Homo sapiens
  Table 4 sequence identifier: Q15365_C163
  MOD_RES (4)..(4): May or may not be conjugated to a chemical probe
KQICLVMLETLSQSPQGRV

SEQ ID NO: 6775 - protein, 23 aa, Homo sapiens
  Table 4 sequence identifier: O14617_C208
  MOD_RES (18)..(18): May or may not be conjugated to a chemical probe
KLEDPDPGVQSAAVNVICELARR

SEQ ID NO: 6776 - protein, 18 aa, Homo sapiens
  Table 4 sequence identifier: P53597_C181
  MOD_RES (16)..(16): May or may not be conjugated to a chemical probe
RLIGPNCPGVINPGECKI

SEQ ID NO: 6777 - protein, 14 aa, Homo sapiens
  Table 4 sequence identifier: P53582_C14
  MOD_RES (8)..(8): May or may not be conjugated to a chemical probe
RVCETDGCSSEAKL

SEQ ID NO: 6778 - protein, 17 aa, Homo sapiens
  Table 4 sequence identifier: Q00839_C497
  MOD_RES (3)..(3): May or may not be conjugated to a chemical probe
KDCEVVMMIGLPGAGKT

SEQ ID NO: 6779 - protein, 18 aa, Homo sapiens
  Table 4 sequence identifier: Q9Y6W5_C27
  MOD_RES (6)..(6): May or may not be conjugated to a chemical probe
RSELECVTNITLANVIRQ

SEQ ID NO: 6780 - protein, 16 aa, Homo sapiens
  Table 4 sequence identifier: Q99439_C164
  MOD_RES (5)..(5): May or may not be conjugated to a chemical probe
KAGQCVIGLQMGTNKC

SEQ ID NO: 6781 - protein, 22 aa, Homo sapiens
  Table 4 sequence identifier: Q9NVG8_C145
  MOD_RES (7)..(7): May or may not be conjugated to a chemical probe
RATDYPCLLILDPQNEFETLRK

SEQ ID NO: 6782 - protein, 27 aa, Homo sapiens
  Table 4 sequence identifier: P10768_C56
  MOD_RES (18)..(18): May or may not be conjugated to a chemical probe
KAETGKCPALYWLSGLTCTEQNFISKS

SEQ ID NO: 6783 - protein, 12 aa, Homo sapiens
  Table 4 sequence identifier: P31146_C345
  MOD_RES (2)..(2): May or may not be conjugated to a chemical probe
RCEPIAMTVPRK

SEQ ID NO: 6784 - protein, 18 aa, Homo sapiens
  Table 4 sequence identifier: O75521_C380
  MOD_RES (7)..(7): May or may not be conjugated to a chemical probe
RWLSDECTNAVVNFLSRK

SEQ ID NO: 6785 - protein, 12 aa, Homo sapiens
  Table 4 sequence identifier: P13796_C336
  MOD_RES (4)..(4): May or may not be conjugated to a chemical probe
RAECMLQQAERL

SEQ ID NO: 6786 - protein, 8 aa, Homo sapiens
  Table 4 sequence identifier: Q15149_C4574
  MOD_RES (5)..(5): May or may not be conjugated to a chemical probe
KYLTCPKT

SEQ ID NO: 6787 - protein, 24 aa, Homo sapiens
  Table 4 sequence identifier: P98171_C569
  MOD_RES (10)..(10): May or may not be conjugated to a chemical probe
RGEDPLVEGCTAHDLDSVAGVLKL

SEQ ID NO: 6788 - protein, 17 aa, Homo sapiens
  Table 4 sequence identifier: P48059_C272
  MOD_RES (4)..(4): May or may not be conjugated to a chemical probe
KAWCVNCFACSTCNTKL

SEQ ID NO: 6789 - protein, 30 aa, Homo sapiens
  Table 4 sequence identifier: Q86WV6_C257
  MOD_RES (5)..(5): May or may not be conjugated to a chemical probe
RAGTCVLEYATPLQTLFAMSQYSQAGFSRE

SEQ ID NO: 6790 - protein, 21 aa, Homo sapiens
  Table 4 sequence identifier: P23743_C707
  MOD_RES (17)..(17): May or may not be conjugated to a chemical probe
KTLPMQIDGEPWMQTPCTIKI

SEQ ID NO: 6791 - protein, 22 aa, Homo sapiens
  Table 4 sequence identifier: Q14204_C3573
  MOD_RES (13)..(13): May or may not be conjugated to a chemical probe
RWQASSLPADDLCTENAIMLKR

SEQ ID NO: 6792 - protein, 19 aa, Homo sapiens
  Table 4 sequence identifier: P22061_C95
  MOD_RES (15)..(15): May or may not be conjugated to a chemical probe
KALDVGSGSGILTACFARM

SEQ ID NO: 6793 - protein, 17 aa, Homo sapiens
  Table 4 sequence identifier: Q86W42_C35
  MOD_RES (14)..(14): May or may not be conjugated to a chemical probe
RLHMTIFSQSVSPCGKF

SEQ ID NO: 6794 - protein, 16 aa, Homo sapiens
  Table 4 sequence identifier: P55072_C535
  MOD_RES (7)..(7): May or may not be conjugated to a chemical probe
KAIANECQANFISIKG

SEQ ID NO: 6795 - protein, 31 aa, Homo sapiens
  Table 4 sequence identifier: Q07666_C264
  MOD_RES (12)..(12): May or may not be conjugated to a chemical probe
KFLVPDMMDDICQEQFLELSYLNGVPEPSRG

SEQ ID NO: 6796 - protein, 8 aa, Homo sapiens
  Table 4 sequence identifier: O00139_C334
  MOD_RES (5)..(5): May or may not be conjugated to a chemical probe
KNQDCSKG

SEQ ID NO: 6797 - protein, 14 aa, Homo sapiens
  Table 4 sequence identifier: P30481_C188
  MOD_RES (8)..(8): May or may not be conjugated to a chemical probe
RAYLEGLCVESLRR

SEQ ID NO: 6798 - protein, 15 aa, Homo sapiens
  Table 4 sequence identifier: P30483_C188
  MOD_RES (8)..(8): May or may not be conjugated to a chemical probe
RAYLEGLCVESLRRY

SEQ ID NO: 6799 - protein, 15 aa, Homo sapiens
  Table 4 sequence identifier: Q8WV92_C233
  MOD_RES (3)..(3): May or may not be conjugated to a chemical probe
RPCHETTVDIFHKKH

SEQ ID NO: 6800 - protein, 11 aa, Homo sapiens
  Table 4 sequence identifier: P49207_C83
  MOD_RES (8)..(8): May or may not be conjugated to a chemical probe
RAYGGSMCAKC

SEQ ID NO: 6801 - protein, 21 aa, Homo sapiens
  Table 4 sequence identifier: P24752_C119
  MOD_RES (15)..(15): May or may not be conjugated to a chemical probe
RQAVLGAGLPISTPCTTINKV

SEQ ID NO: 6802 - protein, 25 aa, Homo sapiens
  Table 4 sequence identifier: P24752_C413
  MOD_RES (11)..(11): May or may not be conjugated to a chemical probe
KQGEYGLASICNGGGGASAMLIQKL

SEQ ID NO: 6803 - protein, 22 aa, Homo sapiens
  Table 4 sequence identifier: Q14141_C42
  MOD_RES (8)..(8): May or may not be conjugated to a chemical probe
KSVSQGFCFNILCVGETGLGKS

SEQ ID NO: 6804 - protein, 12 aa, Homo sapiens
  Table 4 sequence identifier: O95319_C174
  MOD_RES (3)..(3): May or may not be conjugated to a chemical probe
RGCAFVTFSTRA

SEQ ID NO: 6805 - protein, 11 aa, Homo sapiens
  Table 4 sequence identifier: O15144_C120
  MOD_RES (3)..(3): May or may not be conjugated to a chemical probe
RNCFASVFEKY

SEQ ID NO: 6806 - protein, 30 aa, Homo sapiens; identical to SEQ ID NO: 1060
  Table 4 sequence identifier: Q9NTK5_C55
  MOD_RES (21)..(21): May or may not be conjugated to a chemical probe

SEQ ID NO: 6807 - protein, 9 aa, Homo sapiens
  Table 4 sequence identifier: Q9Y490_C1953
  MOD_RES (6)..(6): May or may not be conjugated to a chemical probe
KELIECARR

SEQ ID NO: 6808 - protein, 30 aa, Homo sapiens
  Table 4 sequence identifier: P42331_C258
  MOD_RES (19)..(19): May or may not be conjugated to a chemical probe
RDLPEPVVPWSQYEGFLLCGQLTNADEAKA

SEQ ID NO: 6809 - protein, 18 aa, Homo sapiens
  Table 4 sequence identifier: O75643_C1580
  MOD_RES (11)..(11): May or may not be conjugated to a chemical probe
RLTAIDILTTCAADIQRQ

SEQ ID NO: 6810 - protein, 31 aa, Homo sapiens
  Table 4 sequence identifier: P27635_C49
  MOD_RES (10)..(10): May or may not be conjugated to a chemical probe
KAKVDEFPLCGHMVSDEYEQLSSEALEAARI

SEQ ID NO: 6811 - protein, 9 aa, Homo sapiens
  Table 4 sequence identifier: P04075_C202
  MOD_RES (2)..(2): May or may not be conjugated to a chemical probe
RCQYVTEKV

SEQ ID NO: 6812 - protein, 13 aa, Homo sapiens
  Table 4 sequence identifier: Q92616_C2255
  MOD_RES (9)..(9): May or may not be conjugated to a chemical probe
KGEHVPGFCLPKK

SEQ ID NO: 6813 - protein, 11 aa, Homo sapiens
  Table 4 sequence identifier: Q15149_C3299
  MOD_RES (3)..(3): May or may not be conjugated to a chemical probe
RGCLDEETSRA

SEQ ID NO: 6814 - protein, 11 aa, Homo sapiens
  Table 4 sequence identifier: O94776_C209
  MOD_RES (5)..(5): May or may not be conjugated to a chemical probe
RALDCSSSIRQ

SEQ ID NO: 6815 - protein, 11 aa, Homo sapiens
  Table 4 sequence identifier: O95466_C69
  MOD_RES (6)..(6): May or may not be conjugated to a chemical probe
KWELICDQERF

SEQ ID NO: 6816 - protein, 9 aa, Homo sapiens
  Table 4 sequence identifier: P09972_C202
  MOD_RES (2)..(2): May or may not be conjugated to a chemical probe
RCQYVTEKV

SEQ ID NO: 6817 - protein, 21 aa, Homo sapiens
  Table 4 sequence identifier: Q16186_C80
  MOD_RES (17)..(17): May or may not be conjugated to a chemical probe
RTSGNVEDDLIIFPDDCEFKR

SEQ ID NO: 6818 - protein, 17 aa, Homo sapiens
  Table 4 sequence identifier: Q9Y224_C19
  MOD_RES (15)..(15): May or may not be conjugated to a chemical probe
KLTALDYHNPAGFNCKD

SEQ ID NO: 6819 - protein, 13 aa, Homo sapiens
  Table 4 sequence identifier: P23743_C253
  MOD_RES (5)..(5): May or may not be conjugated to a chemical probe
KALPCEVSTYAKS

SEQ ID NO: 6820 - protein, 28 aa, Homo sapiens
  Table 4 sequence identifier: Q13464_C29
  MOD_RES (8)..(8): May or may not be conjugated to a chemical probe
KSEVNSDCLLDGLDALVYDLDFPALRKN

SEQ ID NO: 6821 - protein, 17 aa, Homo sapiens
  Table 4 sequence identifier: O14617_C1133
  MOD_RES (2)..(2): May or may not be conjugated to a chemical probe
KCSDSTLLSNLLEEMKA

SEQ ID NO: 6822 - protein, 9 aa, Homo sapiens
  Table 4 sequence identifier: P05062_C202
  MOD_RES (2)..(2): May or may not be conjugated to a chemical probe
RCQYVTEKV

SEQ ID NO: 6823 - protein, 13 aa, Homo sapiens
  Table 4 sequence identifier: O95154_C186
  MOD_RES (10)..(10): May or may not be conjugated to a chemical probe
RQVETELFPCLRH

SEQ ID NO: 6824 - protein, 13 aa, Homo sapiens
  Table 4 sequence identifier: Q8NHP1_C186
  MOD_RES (10)..(10): May or may not be conjugated to a chemical probe
RQVETELFPCLRH

SEQ ID NO: 6825 - protein, 13 aa, Homo sapiens
  Table 4 sequence identifier: O43488_C214
  MOD_RES (10)..(10): May or may not be conjugated to a chemical probe
RQVETELFPCLRH

SEQ ID NO: 6826 - protein, 34 aa, Homo sapiens; identical to SEQ ID NO: 5660
  Table 4 sequence identifier: P23246_C431
  MOD_RES (2)..(2): May or may not be conjugated to a chemical probe

SEQ ID NO: 6827 - protein, 17 aa, Homo sapiens
  Table 4 sequence identifier: O00268_C867
  MOD_RES (3)..(3): May or may not be conjugated to a chemical probe
RSCKDETFLLQAPLQRR

SEQ ID NO: 6828 - protein, 16 aa, Homo sapiens
  Table 4 sequence identifier: P61158_C12
  MOD_RES (9)..(9): May or may not be conjugated to a chemical probe
RLPACVVDCGTGYTKL

SEQ ID NO: 6829 - protein, 11 aa, Homo sapiens
  Table 4 sequence identifier: P21333_C2601
  MOD_RES (4)..(4): May or may not be conjugated to a chemical probe
RTPCEEILVKH

SEQ ID NO: 6830 - protein, 17 aa, Homo sapiens
  Table 4 sequence identifier: O00567_C384
  MOD_RES (4)..(4): May or may not be conjugated to a chemical probe
RIDCFSEVPTSVFGEKL

SEQ ID NO: 6831 - protein, 14 aa, Homo sapiens
  Table 4 sequence identifier: P46776_C70
  MOD_RES (6)..(6): May or may not be conjugated to a chemical probe
RNQSFCPTVNLDKL

SEQ ID NO: 6832 - protein, 22 aa, Homo sapiens
  Table 4 sequence identifier: P68366_C54
  MOD_RES (15)..(15): May or may not be conjugated to a chemical probe
KTIGGGDDSFTTFFCETGAGKH

SEQ ID NO: 6833 - protein, 26 aa, Homo sapiens
  Table 4 sequence identifier: P68366_C295
  MOD_RES (16)..(16): May or may not be conjugated to a chemical probe
KAYHEQLSVAEITNACFEPANQMVKC

SEQ ID NO: 6834 - protein, 26 aa, Homo sapiens
  Table 4 sequence identifier: Q71U36_C295
  MOD_RES (16)..(16): May or may not be conjugated to a chemical probe
KAYHEQLSVAEITNACFEPANQMVKC

SEQ ID NO: 6835 - protein, 10 aa, Homo sapiens
  Table 4 sequence identifier: P62829_C125
  MOD_RES (3)..(3): May or may not be conjugated to a chemical probe
KECADLWPRI

SEQ ID NO: 6836 - protein, 9 aa, Homo sapiens
  Table 4 sequence identifier: O95881_C66
  MOD_RES (4)..(4): May or may not be conjugated to a chemical probe
KSWCGACKA

SEQ ID NO: 6837 - protein, 18 aa, Homo sapiens
  Table 4 sequence identifier: P50552_C64
  MOD_RES (13)..(13): May or may not be conjugated to a chemical probe
RKMQPDQQVVINCAIVRG

SEQ ID NO: 6838 - protein, 15 aa, Homo sapiens
  Table 4 sequence identifier: Q9UJU6_C127
  MOD_RES (10)..(10): May or may not be conjugated to a chemical probe
RAEEDVEPECIMEKV

SEQ ID NO: 6839 - protein, 20 aa, Homo sapiens
  Table 4 sequence identifier: Q9UNH7_C264
  MOD_RES (18)..(18): May or may not be conjugated to a chemical probe
RIGSSLYALGTQDSTDICKF

SEQ ID NO: 6840 - protein, 28 aa, Homo sapiens
  Table 4 sequence identifier: Q8WVJ2_C99
  MOD_RES (6)..(6): May or may not be conjugated to a chemical probe
RDAANCWTSLLESEYAADPWVQDQMQRK

SEQ ID NO: 6841 - protein, 33 aa, Homo sapiens; identical to SEQ ID NO: 5613
  Table 4 sequence identifier: Q9Y490_C1486
  MOD_RES (18)..(18): May or may not be conjugated to a chemical probe

SEQ ID NO: 6842 - protein, 17 aa, Homo sapiens
  Table 4 sequence identifier: Q8WYJ6_C231
  MOD_RES (12)..(12): May or may not be conjugated to a chemical probe
KESIPFAVVGSCEVVRD

SEQ ID NO: 6843 - protein, 11 aa, Homo sapiens
  Table 4 sequence identifier: Q15149_C317
  MOD_RES (2)..(2): May or may not be conjugated to a chemical probe
RCDNFTSSWRD

SEQ ID NO: 6844 - protein, 16 aa, Homo sapiens
  Table 4 sequence identifier: Q15027_C79
  MOD_RES (12)..(12): May or may not be conjugated to a chemical probe
RLGPPEPMMAECLEKF

SEQ ID NO: 6845 - protein, 12 aa, Homo sapiens
  Table 4 sequence identifier: Q9BXJ9_C322
  MOD_RES (3)..(3): May or may not be conjugated to a chemical probe
KGCPPVFNTLRS

SEQ ID NO: 6846 - protein, 16 aa, Homo sapiens
  Table 4 sequence identifier: Q86YV0_C447
  MOD_RES (3)..(3): May or may not be conjugated to a chemical probe
RLCGALEPALPAQAKE

SEQ ID NO: 6847 - protein, 14 aa, Homo sapiens
  Table 4 sequence identifier: Q63HN8_C2918
  MOD_RES (4)..(4): May or may not be conjugated to a chemical probe
KGICSSDILVQDRV

SEQ ID NO: 6848 - protein, 16 aa, Homo sapiens
  Table 4 sequence identifier: P61158_C8
  MOD_RES (5)..(5): May or may not be conjugated to a chemical probe
RLPACVVDCGTGYTKL

SEQ ID NO: 6849 - protein, 33 aa, Homo sapiens
  Table 4 sequence identifier: Q8WWQ0_C1144
  MOD_RES (31)..(31): May or may not be conjugated to a chemical probe
KMSPWDMELIPNNAVFPEELGTSVPLTDGECRS

SEQ ID NO: 6850 - protein, 33 aa, Homo sapiens; identical to SEQ ID NO: 5613
  Table 4 sequence identifier: Q9Y490_C1478
  MOD_RES (10)..(10): May or may not be conjugated to a chemical probe

SEQ ID NO: 6851 - protein, 12 aa, Homo sapiens
  Table 4 sequence identifier: Q10567_C95
  MOD_RES (3)..(3): May or may not be conjugated to a chemical probe
KDCEDPNPLIRA

SEQ ID NO: 6852 - protein, 26 aa, Homo sapiens
  Table 4 sequence identifier: Q13748_C295
  MOD_RES (16)..(16): May or may not be conjugated to a chemical probe
KAYHEQLSVAEITNACFEPANQMVKC

SEQ ID NO: 6853 - protein, 23 aa, Homo sapiens
  Table 4 sequence identifier: Q8N1G4_C224
  MOD_RES (20)..(20): May or may not be conjugated to a chemical probe
KTLDLSNNQLSEIPAELADCPKL

SEQ ID NO: 6854 - protein, 21 aa, Homo sapiens
  Table 4 sequence identifier: E9PPU0_C611
  MOD_RES (8)..(8): May or may not be conjugated to a chemical probe
RYLQGTGCIAGLLLPGSQERL

SEQ ID NO: 6855 - protein, 9 aa, Homo sapiens
  Table 4 sequence identifier: Q92878_C102
  MOD_RES (5)..(5): May or may not be conjugated to a chemical probe
RSMVCTQKS

SEQ ID NO: 6856 - protein, 30 aa, Homo sapiens
  Table 4 sequence identifier: Q9UKE5_C202
  MOD_RES (18)..(18): May or may not be conjugated to a chemical probe
RNTFIGTPYWMAPEVIACDENPDATYDFKS

SEQ ID NO: 6857 - protein, 15 aa, Homo sapiens
  Table 4 sequence identifier: Q96FV9_C445
  MOD_RES (6)..(6): May or may not be conjugated to a chemical probe
RLWNLCPDNMEACKS

SEQ ID NO: 6858 - protein, 25 aa, Homo sapiens
  Table 4 sequence identifier: Q92747_C162
  MOD_RES (21)..(21): May or may not be conjugated to a chemical probe
RSTVLSLDWHPNNVLLAAGSCDFKC

SEQ ID NO: 6859 - protein, 25 aa, Homo sapiens
  Table 4 sequence identifier: O15143_C162
  MOD_RES (21)..(21): May or may not be conjugated to a chemical probe
RSTVLSLDWHPNNVLLAAGSCDFKC

SEQ ID NO: 6860 - protein, 10 aa, Homo sapiens
  Table 4 sequence identifier: P12236_C160
  MOD_RES (6)..(6): May or may not be conjugated to a chemical probe
RGLGDCLVKI

SEQ ID NO: 6861 - protein, 10 aa, Homo sapiens
  Table 4 sequence identifier: P05141_C160
  MOD_RES (6)..(6): May or may not be conjugated to a chemical probe
RGLGDCLVKI

SEQ ID NO: 6862 - protein, 17 aa, Homo sapiens
  Table 4 sequence identifier: Q13315_C2021
  MOD_RES (12)..(12): May or may not be conjugated to a chemical probe
RSIGEPDSLYGCGGGKM

SEQ ID NO: 6863 - protein, 18 aa, Homo sapiens
  Table 4 sequence identifier: P50990_C244
  MOD_RES (7)..(7): May or may not be conjugated to a chemical probe
KIAVYSCPFDGMITETKG

SEQ ID NO: 6864 - protein, 9 aa, Homo sapiens
  Table 4 sequence identifier: Q00839_C607
  MOD_RES (6)..(6): May or may not be conjugated to a chemical probe
KAVVVCPKD

SEQ ID NO: 6865 - protein, 19 aa, Homo sapiens
  Table 4 sequence identifier: P10809_C442
  MOD_RES (14)..(14): May or may not be conjugated to a chemical probe
RAAVEEGIVLGGGCALLRC

SEQ ID NO: 6866 - protein, 21 aa, Homo sapiens
  Table 4 sequence identifier: Q676U5_C145
  MOD_RES (16)..(16): May or may not be conjugated to a chemical probe
KIAECLQTISDLETECLDLRT

SEQ ID NO: 6867 - protein, 10 aa, Homo sapiens
  Table 4 sequence identifier: Q86UX7_C235
  MOD_RES (2)..(2): May or may not be conjugated to a chemical probe
RCLMQQGIKA

SEQ ID NO: 6868 - protein, 41 aa, Homo sapiens; identical to SEQ ID NO: 3493
  Table 4 sequence identifier: P21333_C1353
  MOD_RES (36)..(36): May or may not be conjugated to a chemical probe

SEQ ID NO: 6869 - protein, 10 aa, Homo sapiens
  Table 4 sequence identifier: Q56VL3_C27
  MOD_RES (7)..(7): May or may not be conjugated to a chemical probe
KQSLLFCPKS

SEQ ID NO: 6870 - protein, 19 aa, Homo sapiens
  Table 4 sequence identifier: Q14204_C1977
  MOD_RES (12)..(12): May or may not be conjugated to a chemical probe
RMLSAVSQQVQCIQEALRE

SEQ ID NO: 6871 - protein, 25 aa, Homo sapiens
  Table 4 sequence identifier: Q9NUV9_C187
  MOD_RES (19)..(19): May or may not be conjugated to a chemical probe
REAPEDIQDLMDIFGDRYCALNNKA

SEQ ID NO: 6872 - protein, 10 aa, Homo sapiens
  Table 4 sequence identifier: P52272_C114
  MOD_RES (3)..(3): May or may not be conjugated to a chemical probe
RGCAVVEFKM

SEQ ID NO: 6873 - protein, 23 aa, Homo sapiens
  Table 4 sequence identifier: P78527_C3781
  MOD_RES (19)..(19): May or may not be conjugated to a chemical probe
RVEQLFQVMNGILAQDSACSQRA

SEQ ID NO: 6874 - protein, 14 aa, Homo sapiens
  Table 4 sequence identifier: P39023_C114
  MOD_RES (12)..(12): May or may not be conjugated to a chemical probe
KTVFAEHISDECKR

SEQ ID NO: 6875 - protein, 19 aa, Homo sapiens
  Table 4 sequence identifier: Q14202_C1326
  MOD_RES (3)..(3): May or may not be conjugated to a chemical probe
RSCIAESPLWYSVIPMDRS

SEQ ID NO: 6876 - protein, 15 aa, Homo sapiens
  Table 4 sequence identifier: O43684_C129
  MOD_RES (4)..(4): May or may not be conjugated to a chemical probe
RTPCNAGTFSQPEKV

SEQ ID NO: 6877 - protein, 27 aa, Homo sapiens
  Table 4 sequence identifier: Q8N2I2_C302
  MOD_RES (2)..(2): May or may not be conjugated to a chemical probe
KCKECGKAFSCSYDCIIHERIHNGEKP

SEQ ID NO: 6878 - protein, 26 aa, Homo sapiens
  Table 4 sequence identifier: Q92900_C657
  MOD_RES (16)..(16): May or may not be conjugated to a chemical probe
RSILIDESTQATEPECMVPVVLGAKQ

SEQ ID NO: 6879 - protein, 14 aa, Homo sapiens
  Table 4 sequence identifier: Q00839_C389
  MOD_RES (3)..(3): May or may not be conjugated to a chemical probe
KTCNCETEDYGEKF

SEQ ID NO: 6880 - protein, 14 aa, Homo sapiens
  Table 4 sequence identifier: Q00839_C391
  MOD_RES (5)..(5): May or may not be conjugated to a chemical probe
KTCNCETEDYGEKF

SEQ ID NO: 6881 - protein, 12 aa, Homo sapiens
  Table 4 sequence identifier: Q9Y3U8_C48
  MOD_RES (4)..(4): May or may not be conjugated to a chemical probe
REVCGFAPYERR

SEQ ID NO: 6882 - protein, 37 aa, Homo sapiens
  Table 4 sequence identifier: Q7L2J0_C177
  MOD_RES (6)..(6): May or may not be conjugated to a chemical probe
RVNSDCDSVLPSNFLLGGNIFDPLNLNSLLDEEVSRT

SEQ ID NO: 6883 - protein, 18 aa, Homo sapiens
  Table 4 sequence identifier: Q01518_C93
  MOD_RES (10)..(10): May or may not be conjugated to a chemical probe
RALLVTASQCQQPAENKL

SEQ ID NO: 6884 - protein, 15 aa, Homo sapiens
  Table 4 sequence identifier: P55769_C30
  MOD_RES (11)..(11): May or may not be conjugated to a chemical probe
KKLLDLVQQSCNYKQ

SEQ ID NO: 6885 - protein, 11 aa, Homo sapiens
  Table 4 sequence identifier: P46776_C144
  MOD_RES (7)..(7): May or may not be conjugated to a chemical probe
KSVGGACVLVA

SEQ ID NO: 6886 - protein, 27 aa, Homo sapiens
  Table 4 sequence identifier: Q9H3P7_C129
  MOD_RES (13)..(13): May or may not be conjugated to a chemical probe
KQVLMGPYNPDTCPEVGFFDVLGNDRR

SEQ ID NO: 6887 - protein, 12 aa, Homo sapiens
  Table 4 sequence identifier: Q9NQR4_C153
  MOD_RES (7)..(7): May or may not be conjugated to a chemical probe
RVGLGICYDMRF

SEQ ID NO: 6888 - protein, 13 aa, Homo sapiens
  Table 4 sequence identifier: O60216_C392
  MOD_RES (2)..(2): May or may not be conjugated to a chemical probe
RCLTPLVPEDLRK

SEQ ID NO: 6889 - protein, 18 aa, Homo sapiens
  Table 4 sequence identifier: P13639_C67
  MOD_RES (13)..(13): May or may not be conjugated to a chemical probe
RFTDTRKDEQERCITIKS

SEQ ID NO: 6890 - protein, 20 aa, Homo sapiens
  Table 4 sequence identifier: Q8WWP7_C76
  MOD_RES (2)..(2): May or may not be conjugated to a chemical probe
KCHVEVVDTPDIFSSQVSKT

SEQ ID NO: 6891 - protein, 17 aa, Homo sapiens
  Table 4 sequence identifier: Q9NTI5_C1069
  MOD_RES (6)..(6): May or may not be conjugated to a chemical probe
KLYTVCDVAMNIIMSKS

SEQ ID NO: 6892 - protein, 20 aa, Homo sapiens
  Table 4 sequence identifier: P41091_C105
  MOD_RES (3)..(3): May or may not be conjugated to a chemical probe
RSCGSSTPDEFPTDIPGTKG

SEQ ID NO: 6893 - protein, 10 aa, Homo sapiens
  Table 4 sequence identifier: Q9Y2I8_C417
  MOD_RES (5)..(5): May or may not be conjugated to a chemical probe
RINVCVGQKI

SEQ ID NO: 6894 - protein, 27 aa, Homo sapiens
  Table 4 sequence identifier: P52566_C76
  MOD_RES (6)..(6): May or may not be conjugated to a chemical probe
RLTLVCESAPGPITMDLTGDLEALKKE

SEQ ID NO: 6895 - protein, 17 aa, Homo sapiens
  Table 4 sequence identifier: Q9BSJ8_C522
  MOD_RES (8)..(8): May or may not be conjugated to a chemical probe
KAVYSTNCPVWEEAFRF

SEQ ID NO: 6896 - protein, 22 aa, Homo sapiens
  Table 4 sequence identifier: Q8N163_C238
  MOD_RES (14)..(14): May or may not be conjugated to a chemical probe
RVHLTPYTVDSPICDFLELQRR

SEQ ID NO: 6897 - protein, 11 aa, Homo sapiens
  Table 4 sequence identifier: Q92835_C672
  MOD_RES (8)..(8): May or may not be conjugated to a chemical probe
KYNLPSWCDRV

SEQ ID NO: 6898 - protein, 14 aa, Homo sapiens
  Table 4 sequence identifier: Q8NB90_C672
  MOD_RES (11)..(11): May or may not be conjugated to a chemical probe
KGVLLYGPPGCSKT

SEQ ID NO: 6899 - protein, 24 aa, Homo sapiens
  Table 4 sequence identifier: Q92878_C157
  MOD_RES (10)..(10): May or may not be conjugated to a chemical probe
KAVLNNVIFCHQEDSNWPLSEGKA

SEQ ID NO: 6900 - protein, 39 aa, Homo sapiens; identical to SEQ ID NO: 1097
  Table 4 sequence identifier: Q15370_C89
  MOD_RES (10)..(10): May or may not be conjugated to a chemical probe

SEQ ID NO: 6901 - protein, 28 aa, Homo sapiens
  Table 4 sequence identifier: Q9UNF1_C516
  MOD_RES (15)..(15): May or may not be conjugated to a chemical probe
RMGIGLGSENAAGPCNWDEADIGPWAKA

SEQ ID NO: 6902 - protein, 16 aa, Homo sapiens
  Table 4 sequence identifier: Q08AF3_C48
  MOD_RES (4)..(4): May or may not be conjugated to a chemical probe
RAVCALLNSGGGIIKA

SEQ ID NO: 6903 - protein, 11 aa, Homo sapiens
  Table 4 sequence identifier: Q01082_C1900
  MOD_RES (7)..(7): May or may not be conjugated to a chemical probe
KSLLDACESRR

SEQ ID NO: 6904 - protein, 36 aa, Homo sapiens; identical to SEQ ID NO: 1784
  Table 4 sequence identifier: Q8IUI8_C154
  MOD_RES (21)..(21): May or may not be conjugated to a chemical probe

SEQ ID NO: 6905 - protein, 19 aa, Homo sapiens
  Table 4 sequence identifier: P57737_C505
  MOD_RES (15)..(15): May or may not be conjugated to a chemical probe
KGLNLTTPGESDGFCANKL

SEQ ID NO: 6906 - protein, 13 aa, Homo sapiens
  Table 4 sequence identifier: O95336_C237
  MOD_RES (3)..(3): May or may not be conjugated to a chemical probe
KLCWFLDEAAARL

SEQ ID NO: 6907 - protein, 20 aa, Homo sapiens
  Table 4 sequence identifier: O15372_C327
  MOD_RES (15)..(15): May or may not be conjugated to a chemical probe
RMDSLLIAGQINTYCQNIKE

SEQ ID NO: 6908 - protein, 17 aa, Homo sapiens
  Table 4 sequence identifier: Q63HN8_C3609
  MOD_RES (4)..(4): May or may not be conjugated to a chemical probe
REACNQDALQEAGTFRH

SEQ ID NO: 6909 - protein, 22 aa, Homo sapiens
  Table 4 sequence identifier: P00367_C327
  MOD_RES (2)..(2): May or may not be conjugated to a chemical probe
KCIAVGESDGSIWNPDGIDPKE

SEQ ID NO: 6910 - protein, 9 aa, Homo sapiens
  Table 4 sequence identifier: Q15185_C76
  MOD_RES (6)..(6): May or may not be conjugated to a chemical probe
RSILCCLRK

SEQ ID NO: 6911 - protein, 11 aa, Homo sapiens
  Table 4 sequence identifier: Q86UX7_C439
  MOD_RES (2)..(2): May or may not be conjugated to a chemical probe
RCQDEQQYARW

SEQ ID NO: 6912 - protein, 17 aa, Homo sapiens
  Table 4 sequence identifier: A6NHR9_C458
  MOD_RES (11)..(11): May or may not be conjugated to a chemical probe
KLKDEDDEDDCFILEKA

SEQ ID NO: 6913 - protein, 22 aa, Homo sapiens
  Table 4 sequence identifier: P49448_C327
  MOD_RES (2)..(2): May or may not be conjugated to a chemical probe
KCIAVGESDGSIWNPDGIDPKE

SEQ ID NO: 6914 - protein, 22 aa, Homo sapiens
  Table 4 sequence identifier: Q15052_C530
  MOD_RES (6)..(6): May or may not be conjugated to a chemical probe
RIVVHCNNNQDFQEWLEQLNRL

SEQ ID NO: 6915 - protein, 17 aa, Homo sapiens
  Table 4 sequence identifier: H3BQZ7_C538
  MOD_RES (8)..(8): May or may not be conjugated to a chemical probe
RNFILDQCNVYNSGQRR

SEQ ID NO: 6916 - protein, 17 aa, Homo sapiens
  Table 4 sequence identifier: Q1KMD3_C538
  MOD_RES (8)..(8): May or may not be conjugated to a chemical probe
RNFILDQCNVYNSGQRR

SEQ ID NO: 6917 - protein, 10 aa, Homo sapiens
  Table 4 sequence identifier: P11413_C13
  MOD_RES (5)..(5): May or may not be conjugated to a chemical probe
RTQVCGILRE

SEQ ID NO: 6918 - protein, 10 aa, Homo sapiens
  Table 4 sequence identifier: P57737_C34
  MOD_RES (8)..(8): May or may not be conjugated to a chemical probe
RAGTAPSCRN

SEQ ID NO: 6919 - protein, 13 aa, Homo sapiens
  Table 4 sequence identifier: P55735_C187
  MOD_RES (7)..(7): May or may not be conjugated to a chemical probe
RFASGGCDNLIKL

SEQ ID NO: 6920 - protein, 11 aa, Homo sapiens
  Table 4 sequence identifier: P68366_C315
  MOD_RES (5)..(5): May or may not be conjugated to a chemical probe
KYMACCLLYRG

SEQ ID NO: 6921 - protein, 11 aa, Homo sapiens
  Table 4 sequence identifier: P68366_C316
  MOD_RES (6)..(6): May or may not be conjugated to a chemical probe
KYMACCLLYRG

SEQ ID NO: 6922 - protein, 11 aa, Homo sapiens
  Table 4 sequence identifier: Q71U36_C315
  MOD_RES (5)..(5): May or may not be conjugated to a chemical probe
KYMACCLLYRG

SEQ ID NO: 6923 - protein, 11 aa, Homo sapiens
  Table 4 sequence identifier: Q71U36_C316
  MOD_RES (6)..(6): May or may not be conjugated to a chemical probe
KYMACCLLYRG

SEQ ID NO: 6924 - protein, 12 aa, Homo sapiens
  Table 4 sequence identifier: P31146_C195
  MOD_RES (10)..(10): May or may not be conjugated to a chemical probe
RDGGLICTSCRD

SEQ ID NO: 6925 - protein, 11 aa, Homo sapiens
  Table 4 sequence identifier: P68371_C354
  MOD_RES (5)..(5): May or may not be conjugated to a chemical probe
KTAVCDIPPRG

SEQ ID NO: 6926 - protein, 11 aa, Homo sapiens
  Table 4 sequence identifier: P07437_C354
  MOD_RES (5)..(5): May or may not be conjugated to a chemical probe
KTAVCDIPPRG

SEQ ID NO: 6927 - protein, 22 aa, Homo sapiens
  Table 4 sequence identifier: P29350_C102
  MOD_RES (14)..(14): May or may not be conjugated to a chemical probe
RDGTIIHLKYPLNCSDPTSERW

SEQ ID NO: 6928 - protein, 28 aa, Homo sapiens
  Table 4 sequence identifier: P21333_C1260
  MOD_RES (15)..(15): May or may not be conjugated to a chemical probe
KLQVEPAVDTSGVQCYGPGIEGQGVFRE

SEQ ID NO: 6929 - protein, 15 aa, Homo sapiens
  Table 4 sequence identifier: P08670_C328
  MOD_RES (8)..(8): May or may not be conjugated to a chemical probe
RQVQSLTCEVDALKG

SEQ ID NO: 6930 - protein, 20 aa, Homo sapiens
  Table 4 sequence identifier: P42167_C363
  MOD_RES (18)..(18): May or may not be conjugated to a chemical probe
KEMFPYEASTPTGISASCRR

SEQ ID NO: 6931 - protein, 13 aa, Homo sapiens
  Table 4 sequence identifier: Q9H0C8_C325
  MOD_RES (7)..(7): May or may not be conjugated to a chemical probe
RFILLACDGLFKV

SEQ ID NO: 6932 - protein, 21 aa, Homo sapiens
  Table 4 sequence identifier: Q66K74_C342
  MOD_RES (15)..(15): May or may not be conjugated to a chemical probe
RLISPNLGVVFFNACEAASRL

SEQ ID NO: 6933 - protein, 18 aa, Homo sapiens
  Table 4 sequence identifier: Q7KZF4_C560
  MOD_RES (15)..(15): May or may not be conjugated to a chemical probe
KETCLITFLLAGIECPRG

SEQ ID NO: 6934 - protein, 15 aa, Homo sapiens
  Table 4 sequence identifier: Q9P1F3_C39
  MOD_RES (2)..(2): May or may not be conjugated to a chemical probe
KCANLFEALVGTLKA

SEQ ID NO: 6935 - protein, 24 aa, Homo sapiens
  Table 4 sequence identifier: P36507_C211
  MOD_RES (3)..(3): May or may not be conjugated to a chemical probe
KLCDFGVSGQLIDSMANSFVGTRS

SEQ ID NO: 6936 - protein, 24 aa, Homo sapiens
  Table 4 sequence identifier: Q02750_C207
  MOD_RES (3)..(3): May or may not be conjugated to a chemical probe
KLCDFGVSGQLIDSMANSFVGTRS

SEQ ID NO: 6937 - protein, 16 aa, Homo sapiens
  Table 4 sequence identifier: Q8NF50_C685
  MOD_RES (8)..(8): May or may not be conjugated to a chemical probe
RLQTGSYCLPVALEKL

SEQ ID NO: 6938 - protein, 11 aa, Homo sapiens
  Table 4 sequence identifier: Q9BVA1_C354
  MOD_RES (5)..(5): May or may not be conjugated to a chemical probe
KTAVCDIPPRG

SEQ ID NO: 6939 - protein, 21 aa, Homo sapiens
  Table 4 sequence identifier: P36578_C125
  MOD_RES (5)..(5): May or may not be conjugated to a chemical probe
RYAICSALAASALPALVMSKG

SEQ ID NO: 6940 - protein, 22 aa, Homo sapiens
  Table 4 sequence identifier: Q8TD19_C890
  MOD_RES (10)..(10): May or may not be conjugated to a chemical probe
KGTPLTPPACACSSLQVEVERL

SEQ ID NO: 6941 - protein, 26 aa, Homo sapiens
  Table 4 sequence identifier: A6NHR9_C1286
  MOD_RES (12)..(12): May or may not be conjugated to a chemical probe
RDLQNPIIVQLCDQWDNPAPVQHVKI

SEQ ID NO: 6942 - protein, 11 aa, Homo sapiens
  Table 4 sequence identifier: Q9BSD7_C110
  MOD_RES (3)..(3): May or may not be conjugated to a chemical probe
RVCVIDEIGKM

SEQ ID NO: 6943 - protein, 11 aa, Homo sapiens
  Table 4 sequence identifier: Q14573_C1638
  MOD_RES (2)..(2): May or may not be conjugated to a chemical probe
RCESGGFLSKL

SEQ ID NO: 6944 - protein, 10 aa, Homo sapiens
  Table 4 sequence identifier: Q12874_C274
  MOD_RES (2)..(2): May or may not be conjugated to a chemical probe
KCGGTLEERA

SEQ ID NO: 6945 - protein, 25 aa, Homo sapiens
  Table 4 sequence identifier: Q13045_C337
  MOD_RES (23)..(23): May or may not be conjugated to a chemical probe
KLTNLEEFMAANNNLELVPESLCRC

SEQ ID NO: 6946 - protein, 24 aa, Homo sapiens
  Table 4 sequence identifier: Q8IY67_C255
  MOD_RES (16)..(16): May or may not be conjugated to a chemical probe
RALSAVHSPTFCQLACGQDGQLKG

SEQ ID NO: 6947 - protein, 14 aa, Homo sapiens
  Table 4 sequence identifier: P13639_C728
  MOD_RES (2)..(2): May or may not be conjugated to a chemical probe
RCLYASVLTAQPRL

SEQ ID NO: 6948 - protein, 11 aa, Homo sapiens
  Table 4 sequence identifier: P53990_C125
  MOD_RES (8)..(8): May or may not be conjugated to a chemical probe
KIVADQLCAKY

SEQ ID NO: 6949 - protein, 14 aa, Homo sapiens
  Table 4 sequence identifier: P13796_C618
  MOD_RES (9)..(9): May or may not be conjugated to a chemical probe
KMVMTVFACLMGKG

SEQ ID NO: 6950 - protein, 21 aa, Homo sapiens
  Table 4 sequence identifier: Q9BWM7_C193
  MOD_RES (13)..(13): May or may not be conjugated to a chemical probe
RFVPFAAVAAANCINIPLMRQ

SEQ ID NO: 6951 - protein, 21 aa, Homo sapiens
  Table 4 sequence identifier: Q9H9B4_C190
  MOD_RES (13)..(13): May or may not be conjugated to a chemical probe
RFVPFAAVAAANCINIPLMRQ

SEQ ID NO: 6952 - protein, 12 aa, Homo sapiens
  Table 4 sequence identifier: P31146_C192
  MOD_RES (7)..(7): May or may not be conjugated to a chemical probe
RDGGLICTSCRD

SEQ ID NO: 6953 - protein, 28 aa, Homo sapiens
  Table 4 sequence identifier: Q15024_C85
  MOD_RES (16)..(16): May or may not be conjugated to a chemical probe
KLEKPNEGYLEFFVDCSASATPEFEGRG

SEQ ID NO: 6954 - protein, 30 aa, Homo sapiens; identical to SEQ ID NO: 2124
  Table 4 sequence identifier: Q8N4C8_C202
  MOD_RES (18)..(18): May or may not be conjugated to a chemical probe

SEQ ID NO: 6955 - protein, 30 aa, Homo sapiens; identical to SEQ ID NO: 2124
  Table 4 sequence identifier: O95819_C202
  MOD_RES (18)..(18): May or may not be conjugated to a chemical probe

SEQ ID NO: 6956 - protein, 24 aa, Homo sapiens
  Table 4 sequence identifier: P13798_C30
  MOD_RES (9)..(9): May or may not be conjugated to a chemical probe
RQPALSAACLGPEVTTQYGGQYRT

SEQ ID NO: 6957 - protein, 17 aa, Homo sapiens
  Table 4 sequence identifier: P35579_C172
  MOD_RES (8)..(8): May or may not be conjugated to a chemical probe
REDQSILCTGESGAGKT

SEQ ID NO: 6958 - protein, 23 aa, Homo sapiens
  Table 4 sequence identifier: P30626_C194
  MOD_RES (19)..(19): May or may not be conjugated to a chemical probe
RDTAQQGVVNFPYDDFIQCVMSV

SEQ ID NO: 6959 - protein, 25 aa, Homo sapiens
  Table 4 sequence identifier: O15371_C19
  MOD_RES (17)..(17): May or may not be conjugated to a chemical probe
KFMTPVIQDNPSGWGPCAVPEQFRD

SEQ ID NO: 6960 - protein, 12 aa, Homo sapiens
  Table 4 sequence identifier: O00567_C211
  MOD_RES (10)..(10): May or may not be conjugated to a chemical probe
KIINDNATYCRL

SEQ ID NO: 6961 - protein, 23 aa, Homo sapiens
  Table 4 sequence identifier: Q9UGI8_C196
  MOD_RES (14)..(14): May or may not be conjugated to a chemical probe
KSEALGVGDVKLPCEMDAQGPKQ

SEQ ID NO: 6962 - protein, 21 aa, Homo sapiens
  Table 4 sequence identifier: P67936_C247
  MOD_RES (20)..(20): May or may not be conjugated to a chemical probe
KEENVGLHQTLDQTLNELNCI

SEQ ID NO: 6963 - protein, 21 aa, Homo sapiens
  Table 4 sequence identifier: P45954_C175
  MOD_RES (6)..(6): May or may not be conjugated to a chemical probe
KVGSFCLSEAGAGSDSFALKT

SEQ ID NO: 6964 - protein, 16 aa, Homo sapiens
  Table 4 sequence identifier: Q14566_C301
  MOD_RES (7)..(7): May or may not be conjugated to a chemical probe
RLVFLACCVAPTNPRF

SEQ ID NO: 6965 - protein, 16 aa, Homo sapiens
  Table 4 sequence identifier: P50990_C149
  MOD_RES (12)..(12): May or may not be conjugated to a chemical probe
KAHEILPNLVCCSAKN

SEQ ID NO: 6966 - protein, 17 aa, Homo sapiens
  Table 4 sequence identifier: Q08945_C200
  MOD_RES (13)..(13): May or may not be conjugated to a chemical probe
KADVIQATGDAICIFRE

SEQ ID NO: 6967 - protein, 18 aa, Homo sapiens
  Table 4 sequence identifier: P45985_C246
  MOD_RES (3)..(3): May or may not be conjugated to a chemical probe
KLCDFGISGQLVDSIAKT

SEQ ID NO: 6968 - protein, 11 aa, Homo sapiens
  Table 4 sequence identifier: P21333_C2582
  MOD_RES (8)..(8): May or may not be conjugated to a chemical probe
KSSFTVDCSKA

SEQ ID NO: 6969 - protein, 23 aa, Homo sapiens
  Table 4 sequence identifier: P29590_C213
  MOD_RES (9)..(9): May or may not be conjugated to a chemical probe
RGCSKPLCCSCALLDSSHSELKC

SEQ ID NO: 6970 - protein, 17 aa, Homo sapiens
  Table 4 sequence identifier: P13489_C30
  MOD_RES (12)..(12): May or may not be conjugated to a chemical probe
RWAELLPLLQQCQVVRL

SEQ ID NO: 6971 - protein, 29 aa, Homo sapiens
  Table 4 sequence identifier: Q13315_C2770
  MOD_RES (8)..(8): May or may not be conjugated to a chemical probe
RSGVLEWCTGTVPIGEFLVNNEDGAHKRY

SEQ ID NO: 6972 - protein, 13 aa, Homo sapiens
  Table 4 sequence identifier: Q9NR56_C34
  MOD_RES (11)..(11): May or may not be conjugated to a chemical probe
RGTCSRPDTECKF

SEQ ID NO: 6973 - protein, 22 aa, Homo sapiens
  Table 4 sequence identifier: Q08AF3_C114
  MOD_RES (15)..(15): May or may not be conjugated to a chemical probe
KSWNTEAGVPLATLCSNLYHRE

SEQ ID NO: 6974 - protein, 43 aa, Homo sapiens; identical to SEQ ID NO: 3426
  Table 4 sequence identifier: Q53EL6_C150
  MOD_RES (30)..(30): May or may not be conjugated to a chemical probe

SEQ ID NO: 6975 - protein, 21 aa, Homo sapiens
  Table 4 sequence identifier: Q9NPJ6_C162
  MOD_RES (9)..(9): May or may not be conjugated to a chemical probe
RISASNAVCAPLTWVPGDPRR

SEQ ID NO: 6976 - protein, 11 aa, Homo sapiens
  Table 4 sequence identifier: P25398_C92
  MOD_RES (9)..(9): May or may not be conjugated to a chemical probe
KLGEWVGLCKI

SEQ ID NO: 6977 - protein, 29 aa, Homo sapiens
  Table 4 sequence identifier: P57737_C303
  MOD_RES (21)..(21): May or may not be conjugated to a chemical probe
RQLYCYEVVPQQPALSPVTQCVLESVLRG

SEQ ID NO: 6978 - protein, 31 aa, Homo sapiens; identical to SEQ ID NO: 6125
  Table 4 sequence identifier: Q96RL1_C283
  MOD_RES (19)..(19): May or may not be conjugated to a chemical probe

SEQ ID NO: 6979 - protein, 22 aa, Homo sapiens
  Table 4 sequence identifier: P24928_C1245
  MOD_RES (12)..(12): May or may not be conjugated to a chemical probe
KINAGFGDDLNCIFNDDNAEKL

SEQ ID NO: 6980 - protein, 9 aa, Homo sapiens
  Table 4 sequence identifier: P17858_C89
  MOD_RES (2)..(2): May or may not be conjugated to a chemical probe
RCKAFTTRE

SEQ ID NO: 6981 - protein, 18 aa, Homo sapiens
  Table 4 sequence identifier: P50995_C226
  MOD_RES (13)..(13): May or may not be conjugated to a chemical probe
KGFGTDEQAIIDCLGSRS

SEQ ID NO: 6982 - protein, 21 aa, Homo sapiens
  Table 4 sequence identifier: Q7Z460_C1428
  MOD_RES (4)..(4): May or may not be conjugated to a chemical probe
KVLCPIIQTADYPINLAAIKM

SEQ ID NO: 6983 - protein, 21 aa, Homo sapiens
  Table 4 sequence identifier: O75122_C1184
  MOD_RES (4)..(4): May or may not be conjugated to a chemical probe
KVLCPIIQTADYPINLAAIKM

SEQ ID NO: 6984 - protein, 27 aa, Homo sapiens
  Table 4 sequence identifier: Q14008_C1344
  MOD_RES (4)..(4): May or may not be conjugated to a chemical probe
RAECLEELGCLVESYGMNVCQPTPGKA

SEQ ID NO: 6985 - protein, 27 aa, Homo sapiens
  Table 4 sequence identifier: Q14008_C1360
  MOD_RES (20)..(20): May or may not be conjugated to a chemical probe
RAECLEELGCLVESYGMNVCQPTPGKA

SEQ ID NO: 6986 - protein, 14 aa, Homo sapiens
  Table 4 sequence identifier: P16455_C145
  MOD_RES (11)..(11): May or may not be conjugated to a chemical probe
RGNPVPILIPCHRV

SEQ ID NO: 6987 - protein, 24 aa, Homo sapiens
  Table 4 sequence identifier: O14976_C190
  MOD_RES (3)..(3): May or may not be conjugated to a chemical probe
KLCDFGSATTISHYPDYSWSAQRR

SEQ ID NO: 6988 - protein, 10 aa, Homo sapiens
  Table 4 sequence identifier: Q14103_C226
  MOD_RES (4)..(4): May or may not be conjugated to a chemical probe
RGFCFITFKE

SEQ ID NO: 6989 - protein, 44 aa, Homo sapiens; identical to SEQ ID NO: 118
  Table 4 sequence identifier: P11586_C918
  MOD_RES (27)..(27): May or may not be conjugated to a chemical probe

SEQ ID NO: 6990 - protein, 27 aa, Homo sapiens
  Table 4 sequence identifier: Q14008_C1350
  MOD_RES (10)..(10): May or may not be conjugated to a chemical probe
RAECLEELGCLVESYGMNVCQPTPGKA

SEQ ID NO: 6991 - protein, 31 aa, Homo sapiens; identical to SEQ ID NO: 2468
  Table 4 sequence identifier: P42704_C484
  MOD_RES (22)..(22): May or may not be conjugated to a chemical probe

SEQ ID NO: 6992 - protein, 16 aa, Homo sapiens
  Table 4 sequence identifier: P50990_C148
  MOD_RES (11)..(11): May or may not be conjugated to a chemical probe
KAHEILPNLVCCSAKN

SEQ ID NO: 6993 - protein, 13 aa, Homo sapiens
  Table 4 sequence identifier: P33992_C197
  MOD_RES (3)..(3): May or may not be conjugated to a chemical probe
RKCNTDQAGRPKC

SEQ ID NO: 6994 - protein, 11 aa, Homo sapiens
  Table 4 sequence identifier: O43143_C190
  MOD_RES (6)..(6): May or may not be conjugated to a chemical probe
KRGVACTQPRR

SEQ ID NO: 6995 - protein, 27 aa, Homo sapiens
  Table 4 sequence identifier: P07814_C381
  MOD_RES (12)..(12): May or may not be conjugated to a chemical probe
KYNVYPTYDFACPIVDSIEGVTHALRT

SEQ ID NO: 6996 - protein, 17 aa, Homo sapiens
  Table 4 sequence identifier: P24928_C13
  MOD_RES (13)..(13): May or may not be conjugated to a chemical probe
MHGGGPPSGDSACPLRT

SEQ ID NO: 6997 - protein, 22 aa, Homo sapiens
  Table 4 sequence identifier: P24928_C1287
  MOD_RES (2)..(2): May or may not be conjugated to a chemical probe
RCIESNMLTDMTLQGIEQISKV

SEQ ID NO: 6998 - protein, 17 aa, Homo sapiens
  Table 4 sequence identifier: P42858_C664
  MOD_RES (15)..(15): May or may not be conjugated to a chemical probe
RDEATEPGDQENKPCRI

SEQ ID NO: 6999 - protein, 11 aa, Homo sapiens
  Table 4 sequence identifier: Q13155_C23
  MOD_RES (7)..(7): May or may not be conjugated to a chemical probe
RVELPTCMYRL

SEQ ID NO: 7000 - protein, 14 aa, Homo sapiens
  Table 4 sequence identifier: Q14203_C1252
  MOD_RES (6)..(6): May or may not be conjugated to a chemical probe
KVTFSCAAGFGQRH

SEQ ID NO: 7001 - protein, 15 aa, Homo sapiens
  Table 4 sequence identifier: P68366_C347
  MOD_RES (9)..(9): May or may not be conjugated to a chemical probe
RSIQFVDWCPTGFKV

SEQ ID NO: 7002 - protein, 24 aa, Homo sapiens
  Table 4 sequence identifier: Q00839_C648
  MOD_RES (12)..(12): May or may not be conjugated to a chemical probe
KGNFTLPEVAECFDEITYVELQKE

SEQ ID NO: 7003 - protein, 12 aa, Homo sapiens
  Table 4 sequence identifier: Q92616_C2558
  MOD_RES (2)..(2): May or may not be conjugated to a chemical probe
KCLQNPSSDIRL

SEQ ID NO: 7004 - protein, 21 aa, Homo sapiens
  Table 4 sequence identifier: Q86SX6_C67
  MOD_RES (9)..(9): May or may not be conjugated to a chemical probe
KGTPEQPQCGFSNAVVQILRL

SEQ ID NO: 7005 - protein, 23 aa, Homo sapiens
  Table 4 sequence identifier: P24752_C196
  MOD_RES (16)..(16): May or may not be conjugated to a chemical probe
KDGLTDVYNKIHMGSCAENTAKK

SEQ ID NO: 7006 - protein, 11 aa, Homo sapiens
  Table 4 sequence identifier: O75150_C950
  MOD_RES (6)..(6): May or may not be conjugated to a chemical probe
RLTCPCCNTRK

SEQ ID NO: 7007 - protein, 14 aa, Homo sapiens
  Table 4 sequence identifier: P62979_C149
  MOD_RES (7)..(7): May or may not be conjugated to a chemical probe
KCCLTYCFNKPEDK

SEQ ID NO: 7008 - protein, 21 aa, Homo sapiens
  Table 4 sequence identifier: Q9Y3A3_C134
  MOD_RES (9)..(9): May or may not be conjugated to a chemical probe
RHTLDGAACLLNSNKYFPSRV

SEQ ID NO: 7009 - protein, 26 aa, Homo sapiens
  Table 4 sequence identifier: Q8IUI8_C95
  MOD_RES (23)..(23): May or may not be conjugated to a chemical probe
RLVTLLQEVDTIEQETIKPLDDCQKL

SEQ ID NO: 7010 - protein, 10 aa, Homo sapiens
  Table 4 sequence identifier: Q96SK2_C295
  MOD_RES (8)..(8): May or may not be conjugated to a chemical probe
KFQYQLACRS

SEQ ID NO: 7011 - protein, 19 aa, Homo sapiens
  Table 4 sequence identifier: P21964_C238
  MOD_RES (5)..(5): May or may not be conjugated to a chemical probe
RGSSCFECTHYQSFLEYRE

SEQ ID NO: 7012 - protein, 19 aa, Homo sapiens
  Table 4 sequence identifier: P62753_C100
  MOD_RES (3)..(3): May or may not be conjugated to a chemical probe
RGCIVDANLSVLNLVIVKK

SEQ ID NO: 7013 - protein, 13 aa, Homo sapiens
  Table 4 sequence identifier: Q9Y3Z3_C522
  MOD_RES (11)..(11): May or may not be conjugated to a chemical probe
KNPIDHVSFYCKT

SEQ ID NO: 7014 - protein, 15 aa, Homo sapiens
  Table 4 sequence identifier: Q12802_C2142
  MOD_RES (7)..(7): May or may not be conjugated to a chemical probe
RLGIPECILLVTQRI

SEQ ID NO: 7015 - protein, 27 aa, Homo sapiens
  Table 4 sequence identifier: Q14697_C502
  MOD_RES (10)..(10): May or may not be conjugated to a chemical probe
RDGSDYEGWCWPGSAGYPDFTNPTMRA

SEQ ID NO: 7016 - protein, 19 aa, Homo sapiens
  Table 4 sequence identifier: P62826_C112
  MOD_RES (3)..(3): May or may not be conjugated to a chemical probe
RVCENIPIVLCGNKVDIKD

SEQ ID NO: 7017 - protein, 25 aa, Homo sapiens
  Table 4 sequence identifier: O15379_C94
  MOD_RES (12)..(12): May or may not be conjugated to a chemical probe
KSLNAFNVGDDCPVFPGLFEFCSRY

SEQ ID NO: 7018 - protein, 26 aa, Homo sapiens
  Table 4 sequence identifier: P13010_C296
  MOD_RES (6)..(6): May or may not be conjugated to a chemical probe
KETVYCLNDDDETEVLKEDIIQGFRY

SEQ ID NO: 7019 - protein, 17 aa, Homo sapiens
  Table 4 sequence identifier: Q9Y5Y2_C54
  MOD_RES (10)..(10): May or may not be conjugated to a chemical probe
KVGILDVDLCGPSIPRM

SEQ ID NO: 7020 - protein, 10 aa, Homo sapiens
  Table 4 sequence identifier: Q9BRJ7_C171
  MOD_RES (2)..(2): May or may not be conjugated to a chemical probe
KCQLLFALKV

SEQ ID NO: 7021 - protein, 22 aa, Homo sapiens
  Table 4 sequence identifier: P35579_C91
  MOD_RES (10)..(10): May or may not be conjugated to a chemical probe
KVEDMAELTCLNEASVLHNLKE

SEQ ID NO: 7022 - protein, 21 aa, Homo sapiens
  Table 4 sequence identifier: P46940_C494
  MOD_RES (18)..(18): May or may not be conjugated to a chemical probe
KQLSSSVTGLTNIEEENCQRY

SEQ ID NO: 7023 - protein, 15 aa, Homo sapiens
  Table 4 sequence identifier: Q6F5E8_C823
  MOD_RES (4)..(4): May or may not be conjugated to a chemical probe
RSLCPQMLQGSSWRE

SEQ ID NO: 7024 - protein, 14 aa, Homo sapiens
  Table 4 sequence identifier: Q8IX12_C465
  MOD_RES (3)..(3): May or may not be conjugated to a chemical probe
KSCALAEDPQELRD

SEQ ID NO: 7025 - protein, 23 aa, Homo sapiens
  Table 4 sequence identifier: Q6F5E8_C582
  MOD_RES (11)..(11): May or may not be conjugated to a chemical probe
RIVQLMQDDDCPLQSLSVAESRL

SEQ ID NO: 7026 - protein, 13 aa, Homo sapiens
  Table 4 sequence identifier: Q13148_C198
  MOD_RES (2)..(2): May or may not be conjugated to a chemical probe
RCTEDMTEDELRE

SEQ ID NO: 7027 - protein, 20 aa, Homo sapiens
  Table 4 sequence identifier: Q9Y6N5_C337
  MOD_RES (12)..(12): May or may not be conjugated to a chemical probe
RRYPNVFGIGDCTNLPTSKT

SEQ ID NO: 7028 - protein, 10 aa, Homo sapiens
  Table 4 sequence identifier: Q02880_C204
  MOD_RES (8)..(8): May or may not be conjugated to a chemical probe
KFTVETACKE

SEQ ID NO: 7029 - protein, 21 aa, Homo sapiens
  Table 4 sequence identifier: P62826_C120
  MOD_RES (11)..(11): May or may not be conjugated to a chemical probe
RVCENIPIVLCGNKVDIKDRK

SEQ ID NO: 7030 - protein, 13 aa, Homo sapiens
  Table 4 sequence identifier: Q8NBN7_C30
  MOD_RES (9)..(9): May or may not be conjugated to a chemical probe
KDYVTGGACPSKA

SEQ ID NO: 7031 - protein, 14 aa, Homo sapiens
  Table 4 sequence identifier: P62979_C145
  MOD_RES (3)..(3): May or may not be conjugated to a chemical probe
KCCLTYCFNKPEDK

SEQ ID NO: 7032 - protein, 12 aa, Homo sapiens
  Table 4 sequence identifier: P41250_C471
  MOD_RES (8)..(8): May or may not be conjugated to a chemical probe
RSCYDLSCHARA

SEQ ID NO: 7033 - protein, 15 aa, Homo sapiens
  Table 4 sequence identifier: P46940_C781
  MOD_RES (8)..(8): May or may not be conjugated to a chemical probe
KQIPAITCIQSQWRG

SEQ ID NO: 7034 - protein, 21 aa, Homo sapiens
  Table 4 sequence identifier: P42765_C92
  MOD_RES (3)..(3): May or may not be conjugated to a chemical probe
RLCGSGFQSIVNGCQEICVKE

SEQ ID NO: 7035 - protein, 9 aa, Homo sapiens
  Table 4 sequence identifier: Q8WWP7_C186
  MOD_RES (3)..(3): May or may not be conjugated to a chemical probe
RVCAFDNRA

SEQ ID NO: 7036 - protein, 11 aa, Homo sapiens
  Table 4 sequence identifier: P49207_C49
  MOD_RES (7)..(7): May or may not be conjugated to a chemical probe
KSACGVCPGRL

SEQ ID NO: 7037 - protein, 15 aa, Homo sapiens
  Table 4 sequence identifier: Q8IUI8_C313
  MOD_RES (7)..(7): May or may not be conjugated to a chemical probe
RAPTYFCGQTLTFRV

SEQ ID NO: 7038 - protein, 18 aa, Homo sapiens
  Table 4 sequence identifier: P17655_C301
  MOD_RES (6)..(6): May or may not be conjugated to a chemical probe
RWNDNCPSWNTIDPEERE

SEQ ID NO: 7039 - protein, 24 aa, Homo sapiens
  Table 4 sequence identifier: Q13526_C113
  MOD_RES (19)..(19): May or may not be conjugated to a chemical probe
KIKSGEEDFESLASQFSDCSSAKA

SEQ ID NO: 7040 - protein, 17 aa, Homo sapiens
  Table 4 sequence identifier: O60313_C375
  MOD_RES (4)..(4): May or may not be conjugated to a chemical probe
KEGCTVSPETISLNVKG

SEQ ID NO: 7041 - protein, 11 aa, Homo sapiens
  Table 4 sequence identifier: P68371_C303
  MOD_RES (7)..(7): May or may not be conjugated to a chemical probe
KNMMAACDPRH

SEQ ID NO: 7042 - protein, 11 aa, Homo sapiens
  Table 4 sequence identifier: P07437_C303
  MOD_RES (7)..(7): May or may not be conjugated to a chemical probe
KNMMAACDPRH

SEQ ID NO: 7043 - protein, 21 aa, Homo sapiens
  Table 4 sequence identifier: Q9UPN7_C37
  MOD_RES (19)..(19): May or may not be conjugated to a chemical probe
REDLSLPELLDEEDVLQECKV

SEQ ID NO: 7044 - protein, 25 aa, Homo sapiens
  Table 4 sequence identifier: Q96SW2_C188
  MOD_RES (8)..(8): May or may not be conjugated to a chemical probe
KVQILPECVLPSTMSAVQLESLNKC

SEQ ID NO: 7045 - protein, 20 aa, Homo sapiens
  Table 4 sequence identifier: O14980_C1070
  MOD_RES (19)..(19): May or may not be conjugated to a chemical probe
RQMSVPGIFNPHEIPEEMCD

SEQ ID NO: 7046 - protein, 16 aa, Homo sapiens
  Table 4 sequence identifier: Q15366_C109
  MOD_RES (9)..(9): May or may not be conjugated to a chemical probe
RLVVPASQCGSLIGKG

SEQ ID NO: 7047 - protein, 19 aa, Homo sapiens
  Table 4 sequence identifier: P30154_C402
  MOD_RES (10)..(10): May or may not be conjugated to a chemical probe
RLNIISNLDCVNEVIGIRQ

SEQ ID NO: 7048 - protein, 19 aa, Homo sapiens
  Table 4 sequence identifier: P30153_C390
  MOD_RES (10)..(10): May or may not be conjugated to a chemical probe
RLNIISNLDCVNEVIGIRQ

SEQ ID NO: 7049 - protein, 22 aa, Homo sapiens
  Table 4 sequence identifier: P07195_C294
  MOD_RES (16)..(16): May or may not be conjugated to a chemical probe
KGMYGIENEVFLSLPCILNARG

SEQ ID NO: 7050 - protein, 15 aa, Homo sapiens
  Table 4 sequence identifier: P31943_C22
  MOD_RES (7)..(7): May or may not be conjugated to a chemical probe
RGLPWSCSADEVQRF

SEQ ID NO: 7051 - protein, 17 aa, Homo sapiens
  Table 4 sequence identifier: P53582_C40
  MOD_RES (14)..(14): May or may not be conjugated to a chemical probe
KLGIQGSYFCSQECFKG

SEQ ID NO: 7052 - protein, 9 aa, Homo sapiens
  Table 4 sequence identifier: P61221_C88
  MOD_RES (3)..(3): May or may not be conjugated to a chemical probe
RYCANAFKL

SEQ ID NO: 7053 - protein, 11 aa, Homo sapiens
  Table 4 sequence identifier: P49207_C46
  MOD_RES (4)..(4): May or may not be conjugated to a chemical probe
KSACGVCPGRL

SEQ ID NO: 7054 - protein, 21 aa, Homo sapiens
  Table 4 sequence identifier: P13639_C651
  MOD_RES (4)..(4): May or may not be conjugated to a chemical probe
KIWCFGPDGTGPNILTDITKG

SEQ ID NO: 7055 - protein, 11 aa, Homo sapiens
  Table 4 sequence identifier: Q9BVA1_C303
  MOD_RES (7)..(7): May or may not be conjugated to a chemical probe
KNMMAACDPRH

SEQ ID NO: 7056 - protein, 19 aa, Homo sapiens
  Table 4 sequence identifier: Q01082_C604
  MOD_RES (12)..(12): May or may not be conjugated to a chemical probe
KFATDGEGYKPCDPQVIRD

SEQ ID NO: 7057 - protein, 24 aa, Homo sapiens
  Table 4 sequence identifier: Q9Y490_C1045
  MOD_RES (6)..(6): May or may not be conjugated to a chemical probe
KAQEACGPLEMDSALSVVQNLEKD

SEQ ID NO: 7058 - protein, 18 aa, Homo sapiens
  Table 4 sequence identifier: Q15366_C158
  MOD_RES (15)..(15): May or may not be conjugated to a chemical probe
RAITIAGIPQSIIECVKQ

SEQ ID NO: 7059 - protein, 17 aa, Homo sapiens
  Table 4 sequence identifier: O95573_C450
  MOD_RES (5)..(5): May or may not be conjugated to a chemical probe
RLLLCGGAPLSATTQRF

SEQ ID NO: 7060 - protein, 17 aa, Homo sapiens
  Table 4 sequence identifier: Q9BT78_C378
  MOD_RES (7)..(7): May or may not be conjugated to a chemical probe
KQIQSLCFQVNNLLEKI

SEQ ID NO: 7061 - protein, 27 aa, Homo sapiens
  Table 4 sequence identifier: Q53EL6_C288
  MOD_RES (22)..(22): May or may not be conjugated to a chemical probe
RAVGDGILCNTYIDSYKGTVDCVQARA

SEQ ID NO: 7062 - protein, 13 aa, Homo sapiens
  Table 4 sequence identifier: Q92841_C319
  MOD_RES (2)..(2): May or may not be conjugated to a chemical probe
RCTYLVLDEADRM

SEQ ID NO: 7063 - protein, 17 aa, Homo sapiens
  Table 4 sequence identifier: P49411_C127
  MOD_RES (8)..(8): May or may not be conjugated to a chemical probe
RHYAHTDCPGHADYVKN

SEQ ID NO: 7064 - protein, 25 aa, Homo sapiens
  Table 4 sequence identifier: Q96P65_C201
  MOD_RES (13)..(13): May or may not be conjugated to a chemical probe
KYDFLYEKEHICCLEEWTSPVHQKI

SEQ ID NO: 7065 - protein, 16 aa, Homo sapiens
  Table 4 sequence identifier: P46734_C227
  MOD_RES (7)..(7): May or may not be conjugated to a chemical probe
KTMDAGCKPYMAPERI

SEQ ID NO: 7066 - protein, 16 aa, Homo sapiens
  Table 4 sequence identifier: P48643_C253
  MOD_RES (7)..(7): May or may not be conjugated to a chemical probe
KIAILTCPFEPPKPKT

SEQ ID NO: 7067 - protein, 10 aa, Homo sapiens
  Table 4 sequence identifier: Q96GX9_C147
  MOD_RES (2)..(2): May or may not be conjugated to a chemical probe
KCTSGGYYRY

SEQ ID NO: 7068 - protein, 26 aa, Homo sapiens
  Table 4 sequence identifier: O00567_C112
  MOD_RES (14)..(14): May or may not be conjugated to a chemical probe
KIGAAIQEELGYNCQTGGVIAEILRG

SEQ ID NO: 7069 - protein, 18 aa, Homo sapiens
  Table 4 sequence identifier: Q92835_C819
  MOD_RES (13)..(13): May or may not be conjugated to a chemical probe
KSSDSDESYGEGCIALRL

SEQ ID NO: 7070 - protein, 16 aa, Homo sapiens
  Table 4 sequence identifier: P21333_C623
  MOD_RES (4)..(4): May or may not be conjugated to a chemical probe
KIECDDKGDGSCDVRY

SEQ ID NO: 7071 - protein, 11 aa, Homo sapiens
  Table 4 sequence identifier: Q13509_C303
  MOD_RES (7)..(7): May or may not be conjugated to a chemical probe
KNMMAACDPRH

SEQ ID NO: 7072 - protein, 38 aa, Homo sapiens
  Table 4 sequence identifier: O60759_C210
  MOD_RES (10)..(10): May or may not be conjugated to a chemical probe
RLLHGDAANCPSLENMDLDELSLFGPLPGPGPALVDRN

SEQ ID NO: 7073 - protein, 25 aa, Homo sapiens
  Table 4 sequence identifier: Q96P65_C200
  MOD_RES (12)..(12): May or may not be conjugated to a chemical probe
KYDFLYEKEHICCLEEWTSPVHQKI

SEQ ID NO: 7074 - protein, 11 aa, Homo sapiens
  Table 4 sequence identifier: Q9BUF5_C303
  MOD_RES (7)..(7): May or may not be conjugated to a chemical probe
RNMMAACDPRH

SEQ ID NO: 7075 - protein, 19 aa, Homo sapiens
  Table 4 sequence identifier: O75369_C455
  MOD_RES (17)..(17): May or may not be conjugated to a chemical probe
KSPFVVQVGEACNPNACRA

SEQ ID NO: 7076 - protein, 33 aa, Homo sapiens
  Table 4 sequence identifier: Q9UEY8_C245
  MOD_RES (2)..(2): May or may not be conjugated to a chemical probe
KCGILPISQESLLLGDVAYYDYQGSLEEQEERI

SEQ ID NO: 7077 - protein, 18 aa, Homo sapiens
  Table 4 sequence identifier: P06239_C465
  MOD_RES (8)..(8): May or may not be conjugated to a chemical probe
RMVRPDNCPEELYQLMRL

SEQ ID NO: 7078 - protein, 12 aa, Homo sapiens
  Table 4 sequence identifier: P60953_C157
  MOD_RES (5)..(5): May or may not be conjugated to a chemical probe
KYVECSALTQKG

SEQ ID NO: 7079 - protein, 14 aa, Homo sapiens
  Table 4 sequence identifier: P11586_C863
  MOD_RES (10)..(10): May or may not be conjugated to a chemical probe
KQGFGNLPICMAKT

SEQ ID NO: 7080 - protein, 15 aa, Homo sapiens
  Table 4 sequence identifier: Q71U36_C347
  MOD_RES (9)..(9): May or may not be conjugated to a chemical probe
RTIQFVDWCPTGFKV

SEQ ID NO: 7081 - protein, 17 aa, Homo sapiens
  Table 4 sequence identifier: P20073_C363
  MOD_RES (8)..(8): May or may not be conjugated to a chemical probe
RLGTDESCFNMILATRS

SEQ ID NO: 7082 - protein, 9 aa, Homo sapiens
  Table 4 sequence identifier: Q8WYJ6_C293
  MOD_RES (2)..(2): May or may not be conjugated to a chemical probe
RCLQSLARP

SEQ ID NO: 7083 - protein, 19 aa, Homo sapiens
  Table 4 sequence identifier: P04406_C152
  MOD_RES (8)..(8): May or may not be conjugated to a chemical probe
KIISNASCTTNCLAPLAKV

SEQ ID NO: 7084 - protein, 12 aa, Homo sapiens
  Table 4 sequence identifier: P49748_C237
  MOD_RES (9)..(9): May or may not be conjugated to a chemical probe
RTSAVPSPCGKY

SEQ ID NO: 7085 - protein, 20 aa, Homo sapiens
  Table 4 sequence identifier: P53618_C635
  MOD_RES (18)..(18): May or may not be conjugated to a chemical probe
KVLSECSPLMNDIFNKECRQ

SEQ ID NO: 7086 - protein, 13 aa, Homo sapiens
  Table 4 sequence identifier: Q14669_C1538
  MOD_RES (3)..(3): May or may not be conjugated to a chemical probe
KTCPFFFPFDTRQ

SEQ ID NO: 7087 - protein, 10 aa, Homo sapiens
  Table 4 sequence identifier: Q8WWP7_C98
  MOD_RES (6)..(6): May or may not be conjugated to a chemical probe
KTDPGCEERG

SEQ ID NO: 7088 - protein, 10 aa, Homo sapiens
  Table 4 sequence identifier: P49840_C262
  MOD_RES (3)..(3): May or may not be conjugated to a chemical probe
KLCDFGSAKQ

SEQ ID NO: 7089 - protein, 20 aa, Homo sapiens
  Table 4 sequence identifier: Q9UKV3_C1223
  MOD_RES (5)..(5): May or may not be conjugated to a chemical probe
KAAPCIYWLPLTDSQIVQKE

SEQ ID NO: 7090 - protein, 20 aa, Homo sapiens
  Table 4 sequence identifier: Q8N5W9_C86
  MOD_RES (3)..(3): May or may not be conjugated to a chemical probe
RLCPLSFGEGVEFDPLPPKE

SEQ ID NO: 7091 - protein, 41 aa, Homo sapiens; identical to SEQ ID NO: 755
  Table 4 sequence identifier: P68371_C201
  MOD_RES (28)..(28): May or may not be conjugated to a chemical probe

SEQ ID NO: 7092 - protein, 41 aa, Homo sapiens; identical to SEQ ID NO: 755
  Table 4 sequence identifier: P68371_C211
  MOD_RES (38)..(38): May or may not be conjugated to a chemical probe

SEQ ID NO: 7093 - protein, 41 aa, Homo sapiens; identical to SEQ ID NO: 755
  Table 4 sequence identifier: Q9BVA1_C201
  MOD_RES (28)..(28): May or may not be conjugated to a chemical probe

SEQ ID NO: 7094 - protein, 41 aa, Homo sapiens; identical to SEQ ID NO: 755
  Table 4 sequence identifier: Q9BVA1_C211
  MOD_RES (38)..(38): May or may not be conjugated to a chemical probe

SEQ ID NO: 7095 - protein, 41 aa, Homo sapiens; identical to SEQ ID NO: 755
  Table 4 sequence identifier: P07437_C201
  MOD_RES (28)..(28): May or may not be conjugated to a chemical probe

SEQ ID NO: 7096 - protein, 41 aa, Homo sapiens; identical to SEQ ID NO: 755
  Table 4 sequence identifier: P07437_C211
  MOD_RES (38)..(38): May or may not be conjugated to a chemical probe

SEQ ID NO: 7097 - protein, 16 aa, Homo sapiens
  Table 4 sequence identifier: Q8IV04_C305
  MOD_RES (4)..(4): May or may not be conjugated to a chemical probe
RGACPGLLETLGALRA

SEQ ID NO: 7098 - protein, 27 aa, Homo sapiens
  Table 4 sequence identifier: O60664_C341
  MOD_RES (11)..(11): May or may not be conjugated to a chemical probe
RDIAQQLQATCTSLGSSIQGLPTNVKD

SEQ ID NO: 7099 - protein, 24 aa, Homo sapiens
  Table 4 sequence identifier: P53384_C277
  MOD_RES (3)..(3): May or may not be conjugated to a chemical probe
KNCDKGQSFFIDAPDSPATLAYRS

SEQ ID NO: 7100 - protein, 29 aa, Homo sapiens
  Table 4 sequence identifier: Q99439_C240
  MOD_RES (2)..(2): May or may not be conjugated to a chemical probe
KCDNSSMSLQMGYTQGANQSGQVFGLGRQ

SEQ ID NO: 7101 - protein, 10 aa, Homo sapiens
  Table 4 sequence identifier: P49841_C199
  MOD_RES (3)..(3): May or may not be conjugated to a chemical probe
KLCDFGSAKQ

SEQ ID NO: 7102 - protein, 19 aa, Homo sapiens
  Table 4 sequence identifier: P04406_C156
  MOD_RES (12)..(12): May or may not be conjugated to a chemical probe
KIISNASCTTNCLAPLAKV

SEQ ID NO: 7103 - protein, 11 aa, Homo sapiens
  Table 4 sequence identifier: O95758_C55
  MOD_RES (6)..(6): May or may not be conjugated to a chemical probe
RDRPPCSPSRV

SEQ ID NO: 7104 - protein, 15 aa, Homo sapiens
  Table 4 sequence identifier: Q9NY65_C347
  MOD_RES (9)..(9): May or may not be conjugated to a chemical probe
RTIQFVDWCPTGFKV

SEQ ID NO: 7105 - protein, 16 aa, Homo sapiens
  Table 4 sequence identifier: Q13748_C347
  MOD_RES (10)..(10): May or may not be conjugated to a chemical probe
KRTIQFVDWCPTGFKV

SEQ ID NO: 7106 - protein, 37 aa, Homo sapiens; identical to SEQ ID NO: 5776
  Table 4 sequence identifier: Q86WN1_C449
  MOD_RES (18)..(18): May or may not be conjugated to a chemical probe

SEQ ID NO: 7107 - protein, 10 aa, Homo sapiens
  Table 4 sequence identifier: Q92619_C413
  MOD_RES (2)..(2): May or may not be conjugated to a chemical probe
RCEDHDKARF

SEQ ID NO: 7108 - protein, 24 aa, Homo sapiens
  Table 4 sequence identifier: Q93009_C223
  MOD_RES (7)..(7): May or may not be conjugated to a chemical probe
KNQGATCYMNSLLQTLFFTNQLRK

SEQ ID NO: 7109 - protein, 41 aa, Homo sapiens; identical to SEQ ID NO: 755
  Table 4 sequence identifier: Q9BUF5_C201
  MOD_RES (28)..(28): May or may not be conjugated to a chemical probe

SEQ ID NO: 7110 - protein, 41 aa, Homo sapiens; identical to SEQ ID NO: 755
  Table 4 sequence identifier: Q9BUF5_C211
  MOD_RES (38)..(38): May or may not be conjugated to a chemical probe

SEQ ID NO: 7111 - protein, 30 aa, Homo sapiens
  Table 4 sequence identifier: Q70J99_C136
  MOD_RES (11)..(11): May or may not be conjugated to a chemical probe
KDVSGFSDPYCLLGIEQGVGVPGGSPGSRH

SEQ ID NO: 7112 - protein, 34 aa, Homo sapiens; identical to SEQ ID NO: 1526
  Table 4 sequence identifier: O95486_C704
  MOD_RES (30)..(30): May or may not be conjugated to a chemical probe

SEQ ID NO: 7113 - protein, 9 aa, Homo sapiens
  Table 4 sequence identifier: P27987_C693
  MOD_RES (3)..(3): May or may not be conjugated to a chemical probe
KHCESEQRC

SEQ ID NO: 7114 - protein, 10 aa, Homo sapiens
  Table 4 sequence identifier: P84103_C6
  MOD_RES (4)..(4): May or may not be conjugated to a chemical probe
RDSCPLDCKV

SEQ ID NO: 7115 - protein, 9 aa, Homo sapiens
  Table 4 sequence identifier: P24752_C126
  MOD_RES (3)..(3): May or may not be conjugated to a chemical probe
KVCASGMKA

SEQ ID NO: 7116 - protein, 24 aa, Homo sapiens
  Table 4 sequence identifier: O00299_C223
  MOD_RES (8)..(8): May or may not be conjugated to a chemical probe
REEFASTCPDDEEIELAYEQVAKA

SEQ ID NO: 7117 - protein, 19 aa, Homo sapiens
  Table 4 sequence identifier: P68366_C376
  MOD_RES (4)..(4): May or may not be conjugated to a chemical probe
RAVCMLSNTTAIAEAWARL

SEQ ID NO: 7118 - protein, 19 aa, Homo sapiens
  Table 4 sequence identifier: Q71U36_C376
  MOD_RES (4)..(4): May or may not be conjugated to a chemical probe
RAVCMLSNTTAIAEAWARL

SEQ ID NO: 7119 - protein, 16 aa, Homo sapiens
  Table 4 sequence identifier: Q15365_C109
  MOD_RES (9)..(9): May or may not be conjugated to a chemical probe
RLVVPATQCGSLIGKG

SEQ ID NO: 7120 - protein, 12 aa, Homo sapiens
  Table 4 sequence identifier: P62280_C60
  MOD_RES (2)..(2): May or may not be conjugated to a chemical probe
KCPFTGNVSIRG

SEQ ID NO: 7121 - protein, 22 aa, Homo sapiens
  Table 4 sequence identifier: P62829_C28
  MOD_RES (14)..(14): May or may not be conjugated to a chemical probe
RISLGLPVGAVINCADNTGAKN

SEQ ID NO: 7122 - protein, 24 aa, Homo sapiens
  Table 4 sequence identifier: P05388_C119
  MOD_RES (8)..(8): May or may not be conjugated to a chemical probe
RAGAIAPCEVTVPAQNTGLGPEKT

SEQ ID NO: 7123 - protein, 11 aa, Homo sapiens
  Table 4 sequence identifier: P62937_C161
  MOD_RES (7)..(7): May or may not be conjugated to a chemical probe
KITIADCGQLE

SEQ ID NO: 7124 - protein, 26 aa, Homo sapiens
  Table 4 sequence identifier: P28062_C120
  MOD_RES (16)..(16): May or may not be conjugated to a chemical probe
KVIEINPYLLGTMSGCAADCQYWERL

SEQ ID NO: 7125 - protein, 26 aa, Homo sapiens
  Table 4 sequence identifier: P28062_C124
  MOD_RES (20)..(20): May or may not be conjugated to a chemical probe
KVIEINPYLLGTMSGCAADCQYWERL

SEQ ID NO: 7126 - protein, 14 aa, Homo sapiens
  Table 4 sequence identifier: Q9Y228_C256
  MOD_RES (10)..(10): May or may not be conjugated to a chemical probe
RSLENQLYTCTQKY

SEQ ID NO: 7127 - protein, 14 aa, Homo sapiens
  Table 4 sequence identifier: Q9BY49_C191
  MOD_RES (9)..(9): May or may not be conjugated to a chemical probe
KSLALEWACSGIRI

SEQ ID NO: 7128 - protein, 9 aa, Homo sapiens
  Table 4 sequence identifier: P30154_C306
  MOD_RES (3)..(3): May or may not be conjugated to a chemical probe
KDCEAEVRA

SEQ ID NO: 7129 - protein, 9 aa, Homo sapiens
  Table 4 sequence identifier: P30153_C294
  MOD_RES (3)..(3): May or may not be conjugated to a chemical probe
KDCEAEVRA

SEQ ID NO: 7130 - protein, 18 aa, Homo sapiens
  Table 4 sequence identifier: P52564_C196
  MOD_RES (3)..(3): May or may not be conjugated to a chemical probe
KMCDFGISGYLVDSVAKT

SEQ ID NO: 7131 - protein, 18 aa, Homo sapiens
  Table 4 sequence identifier: P46734_C207
  MOD_RES (3)..(3): May or may not be conjugated to a chemical probe
KMCDFGISGYLVDSVAKT

SEQ ID NO: 7132 - protein, 23 aa, Homo sapiens
  Table 4 sequence identifier: Q9NYL9_C150
  MOD_RES (3)..(3): May or may not be conjugated to a chemical probe
KFCNIMGSSNGVDQEHFSNVVKG

SEQ ID NO: 7133 - protein, 43 aa, Homo sapiens; identical to SEQ ID NO: 479
  Table 4 sequence identifier: O75175_C600
  MOD_RES (33)..(33): May or may not be conjugated to a chemical probe

SEQ ID NO: 7134 - protein, 24 aa, Homo sapiens
  Table 4 sequence identifier: Q9H0D6_C736
  MOD_RES (16)..(16): May or may not be conjugated to a chemical probe
KFSLDEEAILPDQIVCSPVPMLRD

SEQ ID NO: 7135 - protein, 11 aa, Homo sapiens
  Table 4 sequence identifier: Q8IV53_C52
  MOD_RES (3)..(3): May or may not be conjugated to a chemical probe
KFCFPFDVERE

SEQ ID NO: 7136 - protein, 12 aa, Homo sapiens
  Table 4 sequence identifier: P26358_C1478
  MOD_RES (6)..(6): May or may not be conjugated to a chemical probe
RGVCSCVEAGKA

SEQ ID NO: 7137 - protein, 17 aa, Homo sapiens
  Table 4 sequence identifier: Q7RTV0_C40
  MOD_RES (12)..(12): May or may not be conjugated to a chemical probe
KCVICDSYVRPCTLVRI

SEQ ID NO: 7138 - protein, 31 aa, Homo sapiens; identical to SEQ ID NO: 200
  Table 4 sequence identifier: P51570_C182
  MOD_RES (17)..(17): May or may not be conjugated to a chemical probe

SEQ ID NO: 7139 - protein, 17 aa, Homo sapiens
  Table 4 sequence identifier: Q9Y490_C1939
  MOD_RES (7)..(7): May or may not be conjugated to a chemical probe
KAGALQCSPSDAYTKKE

SEQ ID NO: 7140 - protein, 18 aa, Homo sapiens
  Table 4 sequence identifier: P49848_C460
  MOD_RES (12)..(12): May or may not be conjugated to a chemical probe
RAEFGSLGPLLCSQVVKA

SEQ ID NO: 7141 - protein, 22 aa, Homo sapiens
  Table 4 sequence identifier: Q9NY65_C376
  MOD_RES (7)..(7): May or may not be conjugated to a chemical probe
KVQRAVCMLSNTTAIAEAWARL

SEQ ID NO: 7142 - protein, 19 aa, Homo sapiens
  Table 4 sequence identifier: Q13748_C376
  MOD_RES (4)..(4): May or may not be conjugated to a chemical probe
RAVCMLSNTTAIAEAWARL

SEQ ID NO: 7143 - protein, 14 aa, Homo sapiens
  Table 4 sequence identifier: Q9Y512_C457
  MOD_RES (3)..(3): May or may not be conjugated to a chemical probe
RICDGVQFGAGIRF

SEQ ID NO: 7144 - protein, 31 aa, Homo sapiens
  Table 4 sequence identifier: P40939_C470
  MOD_RES (11)..(11): May or may not be conjugated to a chemical probe
KEVEAVIPDHCIFASNTSALPISEIAAVSKR

SEQ ID NO: 7145 - protein, 26 aa, Homo sapiens
  Table 4 sequence identifier: Q6VY07_C732
  MOD_RES (24)..(24): May or may not be conjugated to a chemical probe
RVMQYVNGAATTHQLPVAEAMLTCRH

SEQ ID NO: 7146 - protein, 23 aa, Homo sapiens
  Table 4 sequence identifier: Q9NWV8_C222
  MOD_RES (11)..(11): May or may not be conjugated to a chemical probe
RTILVYSRPPCQPQFSLTEPMKK

SEQ ID NO: 7147 - protein, 11 aa, Homo sapiens
  Table 4 sequence identifier: Q7KZF4_C152
  MOD_RES (5)..(5): May or may not be conjugated to a chemical probe
RLSECEEQAKA

SEQ ID NO: 7148 - protein, 16 aa, Homo sapiens
  Table 4 sequence identifier: P12814_C480
  MOD_RES (3)..(3): May or may not be conjugated to a chemical probe
KICDQWDNLGALTQKR

SEQ ID NO: 7149 - protein, 23 aa, Homo sapiens
  Table 4 sequence identifier: P07900_C597
  MOD_RES (7)..(7): May or may not be conjugated to a chemical probe
RLVTSPCCIVTSTYGWTANMERI

SEQ ID NO: 7150 - protein, 23 aa, Homo sapiens
  Table 4 sequence identifier: P07900_C598
  MOD_RES (8)..(8): May or may not be conjugated to a chemical probe
RLVTSPCCIVTSTYGWTANMERI

SEQ ID NO: 7151 - protein, 20 aa, Homo sapiens
  Table 4 sequence identifier: H0Y2S0_C31
  MOD_RES (16)..(16): May or may not be conjugated to a chemical probe
KIDRYTQQGFGNLPICMAKT

SEQ ID NO: 7152 - protein, 20 aa, Homo sapiens
  Table 4 sequence identifier: Q6UB35_C906
  MOD_RES (16)..(16): May or may not be conjugated to a chemical probe
KIDRYTQQGFGNLPICMAKT

SEQ ID NO: 7153 - protein, 10 aa, Homo sapiens
  Table 4 sequence identifier: Q71UM5_C77
  MOD_RES (6)..(6): May or may not be conjugated to a chemical probe
RLTEGCSFRR

SEQ ID NO: 7154 - protein, 10 aa, Homo sapiens
  Table 4 sequence identifier: P42677_C77
  MOD_RES (6)..(6): May or may not be conjugated to a chemical probe
RLTEGCSFRR

SEQ ID NO: 7155 - protein, 26 aa, Homo sapiens
  Table 4 sequence identifier: Q08211_C1029
  MOD_RES (6)..(6): May or may not be conjugated to a chemical probe
KSSVNCPFSSQDMKYPSPFFVFGEKI

SEQ ID NO: 7156 - protein, 15 aa, Homo sapiens
  Table 4 sequence identifier: O15533_C115
  MOD_RES (12)..(12): May or may not be conjugated to a chemical probe
KWASGLTPAQNCPRA

SEQ ID NO: 7157 - protein, 14 aa, Homo sapiens
  Table 4 sequence identifier: P29590_C389
  MOD_RES (8)..(8): May or may not be conjugated to a chemical probe
RLQDLSSCITQGKD

SEQ ID NO: 7158 - protein, 16 aa, Homo sapiens
  Table 4 sequence identifier: P62937_C62
  MOD_RES (8)..(8): May or may not be conjugated to a chemical probe
RIIPGFMCQGGDFTRH

SEQ ID NO: 7159 - protein, 14 aa, Homo sapiens
  Table 4 sequence identifier: Q14204_C1999
  MOD_RES (8)..(8): May or may not be conjugated to a chemical probe
KTSAPITCELLNKQ

SEQ ID NO: 7160 - protein, 30 aa, Homo sapiens; identical to SEQ ID NO: 1267
  Table 4 sequence identifier: Q13561_C240
  MOD_RES (2)..(2): May or may not be conjugated to a chemical probe

SEQ ID NO: 7161 - protein, 30 aa, Homo sapiens; identical to SEQ ID NO: 1267
  Table 4 sequence identifier: Q13561_C256
  MOD_RES (18)..(18): May or may not be conjugated to a chemical probe

SEQ ID NO: 7162 - protein, 24 aa, Homo sapiens
  Table 4 sequence identifier: H3BQZ7_C602
  MOD_RES (10)..(10): May or may not be conjugated to a chemical probe
KANFSLPEKCDYMDEVTYGELEKE

SEQ ID NO: 7163 - protein, 24 aa, Homo sapiens
  Table 4 sequence identifier: Q1KMD3_C602
  MOD_RES (10)..(10): May or may not be conjugated to a chemical probe
KANFSLPEKCDYMDEVTYGELEKE

SEQ ID NO: 7164 - protein, 15 aa, Homo sapiens
  Table 4 sequence identifier: P61247_C96
  MOD_RES (3)..(3): May or may not be conjugated to a chemical probe
KNCLTNFHGMDLTRD

SEQ ID NO: 7165 - protein, 15 aa, Homo sapiens
  Table 4 sequence identifier: P68871_C94
  MOD_RES (12)..(12): May or may not be conjugated to a chemical probe
KGTFATLSELHCDKL

SEQ ID NO: 7166 - protein, 26 aa, Homo sapiens
  Table 4 sequence identifier: Q9UHD8_C375
  MOD_RES (19)..(19): May or may not be conjugated to a chemical probe
KLTVIDTPGFGDHINNENCWQPIMKF

SEQ ID NO: 7167 - protein, 18 aa, Homo sapiens
  Table 4 sequence identifier: Q8NFW8_C394
  MOD_RES (12)..(12): May or may not be conjugated to a chemical probe
RVGLSGAPADACSTAQKA

SEQ ID NO: 7168 - protein, 10 aa, Homo sapiens
  Table 4 sequence identifier: P51878_C315
  MOD_RES (8)..(8): May or may not be conjugated to a chemical probe
KVIIVQACRG

SEQ ID NO: 7169 - protein, 10 aa, Homo sapiens
  Table 4 sequence identifier: P49662_C258
  MOD_RES (8)..(8): May or may not be conjugated to a chemical probe
KVIIVQACRG

SEQ ID NO: 7170 - protein, 21 aa, Homo sapiens
  Table 4 sequence identifier: O75083_C170
  MOD_RES (10)..(10): May or may not be conjugated to a chemical probe
RLATGSDDNCAAFFEGPPFKF

SEQ ID NO: 7171 - protein, 11 aa, Homo sapiens
  Table 4 sequence identifier: P55884_C515
  MOD_RES (9)..(9): May or may not be conjugated to a chemical probe
RNLFNVVDCKL

SEQ ID NO: 7172 - protein, 17 aa, Homo sapiens
  Table 4 sequence identifier: Q9UKX7_C181
  MOD_RES (9)..(9): May or may not be conjugated to a chemical probe
KHVNTNPLCDLTPIFKD

SEQ ID NO: 7173 - protein, 31 aa, Homo sapiens; identical to SEQ ID NO: 1549
  Table 4 sequence identifier: Q13185_C69
  MOD_RES (18)..(18): May or may not be conjugated to a chemical probe

SEQ ID NO: 7174 - protein, 24 aa, Homo sapiens
  Table 4 sequence identifier: O00299_C59
  MOD_RES (3)..(3): May or may not be conjugated to a chemical probe
KLCPGGQLPFLLYGTEVHTDTNKI

SEQ ID NO: 7175 - protein, 13 aa, Homo sapiens
  Table 4 sequence identifier: Q06587_C69
  MOD_RES (3)..(3): May or may not be conjugated to a chemical probe
RFCSDCIVTALRS

SEQ ID NO: 7176 - protein, 29 aa, Homo sapiens
  Table 4 sequence identifier: Q14204_C3033
  MOD_RES (27)..(27): May or may not be conjugated to a chemical probe
RMNTLLANGEVPGLFEGDEYATLMTQCKE

SEQ ID NO: 7177 - protein, 41 aa, Homo sapiens
  Table 4 sequence identifier: Q13045_C241
  MOD_RES (32)..(32): May or may not be conjugated to a chemical probe
RTQSNLPTSLEGLSNLADVDLSCNDLTRVPECLYTLPSLRR

SEQ ID NO: 7178 - protein, 9 aa, Homo sapiens
  Table 4 sequence identifier: P48643_C181
  MOD_RES (6)..(6): May or may not be conjugated to a chemical probe
KVVNSCHRQ

SEQ ID NO: 7179 - protein, 18 aa, Homo sapiens
  Table 4 sequence identifier: Q04726_C528
  MOD_RES (9)..(9): May or may not be conjugated to a chemical probe
KSPISQLDCLNRDNYIRS

SEQ ID NO: 7180 - protein, 20 aa, Homo sapiens
  Table 4 sequence identifier: Q15149_C3493
  MOD_RES (9)..(9): May or may not be conjugated to a chemical probe
RTLLQGSGCLAGIYLEDTKE

SEQ ID NO: 7181 - protein, 11 aa, Homo sapiens
  Table 4 sequence identifier: O00299_C24
  MOD_RES (5)..(5): May or may not be conjugated to a chemical probe
KIGNCPFSQRL

SEQ ID NO: 7182 - protein, 11 aa, Homo sapiens
  Table 4 sequence identifier: P35579_C694
  MOD_RES (2)..(2): May or may not be conjugated to a chemical probe
RCNGVLEGIRI

SEQ ID NO: 7183 - protein, 22 aa, Homo sapiens
  Table 4 sequence identifier: Q9Y490_C732
  MOD_RES (12)..(12): May or may not be conjugated to a chemical probe
KVVAPTISSPVCQEQLVEAGRL

SEQ ID NO: 7184 - protein, 9 aa, Homo sapiens
  Table 4 sequence identifier: Q8WWP7_C66
  MOD_RES (3)..(3): May or may not be conjugated to a chemical probe
RACTTGSRR

SEQ ID NO: 7185 - protein, 9 aa, Homo sapiens
  Table 4 sequence identifier: P49721_C91
  MOD_RES (6)..(6): May or may not be conjugated to a chemical probe
RNLADCLRS

SEQ ID NO: 7186 - protein, 9 aa, Homo sapiens
  Table 4 sequence identifier: P52272_C653
  MOD_RES (3)..(3): May or may not be conjugated to a chemical probe
KACQIFVRN

SEQ ID NO: 7187 - protein, 27 aa, Homo sapiens
  Table 4 sequence identifier: Q9UK45_C85
  MOD_RES (9)..(9): May or may not be conjugated to a chemical probe
RGTSVVLICPQDGMEAIPNPFIQQQDA

SEQ ID NO: 7188 - protein, 19 aa, Homo sapiens
  Table 4 sequence identifier: P21333_C2199
  MOD_RES (16)..(16): May or may not be conjugated to a chemical probe
KTHEAEIVEGENHTYCIRF

SEQ ID NO: 7189 - protein, 22 aa, Homo sapiens
  Table 4 sequence identifier: P22087_C268
  MOD_RES (4)..(4): May or may not be conjugated to a chemical probe
KANCIDSTASAEAVFASEVKKM

SEQ ID NO: 7190 - protein, 16 aa, Homo sapiens
  Table 4 sequence identifier: Q99714_C214
  MOD_RES (3)..(3): May or may not be conjugated to a chemical probe
KVCNFLASQVPFPSRL

SEQ ID NO: 7191 - protein, 25 aa, Homo sapiens
  Table 4 sequence identifier: Q96F86_C413
  MOD_RES (17)..(17): May or may not be conjugated to a chemical probe
KDLPTSPVDLVINCLDCPENVFLRD

SEQ ID NO: 7192 - protein, 20 aa, Homo sapiens
  Table 4 sequence identifier: P53621_C975
  MOD_RES (9)..(9): May or may not be conjugated to a chemical probe
RTTYQALPCLPSMYGYPNRN

SEQ ID NO: 7193 - protein, 23 aa, Homo sapiens
  Table 4 sequence identifier: Q96S55_C272
  MOD_RES (20)..(20): May or may not be conjugated to a chemical probe
RSLLETNEIPSLILWGPPGCGKT

SEQ ID NO: 7194 - protein, 16 aa, Homo sapiens
  Table 4 sequence identifier: P15498_C652
  MOD_RES (13)..(13): May or may not be conjugated to a chemical probe
RNTSTNEIGWFPCNRV

SEQ ID NO: 7195 - protein, 22 aa, Homo sapiens
  Table 4 sequence identifier: P53621_C453
  MOD_RES (7)..(7): May or may not be conjugated to a chemical probe
KVQVPNCDEIFYAGTGNLLLRD

SEQ ID NO: 7196 - protein, 9 aa, Homo sapiens
  Table 4 sequence identifier: Q96RU3_C248
  MOD_RES (2)..(2): May or may not be conjugated to a chemical probe
KCLDGIVKA

SEQ ID NO: 7197 - protein, 38 aa, Homo sapiens; identical to SEQ ID NO: 1142
  Table 4 sequence identifier: Q13148_C39
  MOD_RES (34)..(34): May or may not be conjugated to a chemical probe

SEQ ID NO: 7198 - protein, 38 aa, Homo sapiens; identical to SEQ ID NO: 121
  Table 4 sequence identifier: Q9NYL9_C132
  MOD_RES (21)..(21): May or may not be conjugated to a chemical probe

SEQ ID NO: 7199 - protein, 10 aa, Homo sapiens
  Table 4 sequence identifier: Q5VWZ2_C12
  MOD_RES (2)..(2): May or may not be conjugated to a chemical probe
RCIVSPAGRH

SEQ ID NO: 7200 - protein, 19 aa, Homo sapiens
  Table 4 sequence identifier: Q7Z5K2_C1170
  MOD_RES (10)..(10): May or may not be conjugated to a chemical probe
KFLSFMNLTCAVGTTGQKS

SEQ ID NO: 7201 - protein, 26 aa, Homo sapiens
  Table 4 sequence identifier: Q13148_C244
  MOD_RES (18)..(18): May or may not be conjugated to a chemical probe
RAFAFVTFADDQIAQSLCGEDLIIKG

SEQ ID NO: 7202 - protein, 14 aa, Homo sapiens
  Table 4 sequence identifier: Q13200_C779
  MOD_RES (7)..(7): May or may not be conjugated to a chemical probe
KGTLTLCPYHSDRQ

SEQ ID NO: 7203 - protein, 20 aa, Homo sapiens
  Table 4 sequence identifier: Q99460_C806
  MOD_RES (4)..(4): May or may not be conjugated to a chemical probe
KSNCKPSTFAYPAPLEVPKE

SEQ ID NO: 7204 - protein, 9 aa, Homo sapiens
  Table 4 sequence identifier: P29466_C397
  MOD_RES (2)..(2): May or may not be conjugated to a chemical probe
RCFYLFPGH

SEQ ID NO: 7205 - protein, 33 aa, Homo sapiens; identical to SEQ ID NO: 1228
  Table 4 sequence identifier: P63279_C138
  MOD_RES (29)..(29): May or may not be conjugated to a chemical probe

SEQ ID NO: 7206 - protein, 23 aa, Homo sapiens
  Table 4 sequence identifier: Q92608_C1408
  MOD_RES (10)..(10): May or may not be conjugated to a chemical probe
KNAPGQYIQCFTVQPVLDEHPRF

SEQ ID NO: 7207 - protein, 23 aa, Homo sapiens
  Table 4 sequence identifier: Q9H6A0_C104
  MOD_RES (7)..(7): May or may not be conjugated to a chemical probe
KAIPLFCFPDGNEWASLTEYPRE

SEQ ID NO: 7208 - protein, 25 aa, Homo sapiens
  Table 4 sequence identifier: Q96F86_C410
  MOD_RES (14)..(14): May or may not be conjugated to a chemical probe
KDLPTSPVDLVINCLDCPENVFLRD

SEQ ID NO: 7209 - protein, 28 aa, Homo sapiens
  Table 4 sequence identifier: Q12824_C147
  MOD_RES (21)..(21): May or may not be conjugated to a chemical probe
RNSQWVPTLPNSSHHLDAVPCSTTINRN

SEQ ID NO: 7210 - protein, 18 aa, Homo sapiens
  Table 4 sequence identifier: O75427_C134
  MOD_RES (12)..(12): May or may not be conjugated to a chemical probe
RNQLSLLPPYICQLPLRV

SEQ ID NO: 7211 - protein, 14 aa, Homo sapiens
  Table 4 sequence identifier: Q08211_C438
  MOD_RES (5)..(5): May or may not be conjugated to a chemical probe
RAAECNIVVTQPRR

SEQ ID NO: 7212 - protein, 12 aa, Homo sapiens
  Table 4 sequence identifier: P11387_C630
  MOD_RES (7)..(7): May or may not be conjugated to a chemical probe
RAVAILCNHQRA

SEQ ID NO: 7213 - protein, 36 aa, Homo sapiens
  Table 4 sequence identifier: A6NHR9_C985
  MOD_RES (15)..(15): May or may not be conjugated to a chemical probe
KFSGAPNLPVYVVDCSSSGTSILTGSAIQVQNIKKD

SEQ ID NO: 7214 - protein, 14 aa, Homo sapiens
  Table 4 sequence identifier: P62195_C112
  MOD_RES (12)..(12): May or may not be conjugated to a chemical probe
KNIDINDVTPNCRV

SEQ ID NO: 7215 - protein, 25 aa, Homo sapiens
  Table 4 sequence identifier: O43772_C58
  MOD_RES (22)..(22): May or may not be conjugated to a chemical probe
RLQTQPPSLPGQPPMYSGTFDCFRK

SEQ ID NO: 7216 - protein, 40 aa, Homo sapiens; identical to SEQ ID NO: 50
  Table 4 sequence identifier: Q71U36_C20
  MOD_RES (19)..(19): May or may not be conjugated to a chemical probe

SEQ ID NO: 7217 - protein, 19 aa, Homo sapiens
  Table 4 sequence identifier: Q15149_C3008
  MOD_RES (2)..(2): May or may not be conjugated to a chemical probe
RCVEDPETGLCLLPLTDKA

SEQ ID NO: 7218 - protein, 9 aa, Homo sapiens
  Table 4 sequence identifier: O75427_C224
  MOD_RES (7)..(7): May or may not be conjugated to a chemical probe
RIPVSFCRL

SEQ ID NO: 7219 - protein, 31 aa, Homo sapiens; identical to SEQ ID NO: 2928
  Table 4 sequence identifier: Q8N201_C1633
  MOD_RES (24)..(24): May or may not be conjugated to a chemical probe

SEQ ID NO: 7220 - protein, 40 aa, Homo sapiens; identical to SEQ ID NO: 50
  Table 4 sequence identifier: Q71U36_C25
  MOD_RES (24)..(24): May or may not be conjugated to a chemical probe

SEQ ID NO: 7221 - protein, 14 aa, Homo sapiens
  Table 4 sequence identifier: P07195_C164
  MOD_RES (7)..(7): May or may not be conjugated to a chemical probe
RVIGSGCNLDSARF

SEQ ID NO: 7222 - protein, 14 aa, Homo sapiens
  Table 4 sequence identifier: P00338_C163
  MOD_RES (7)..(7): May or may not be conjugated to a chemical probe
RVIGSGCNLDSARF

SEQ ID NO: 7223 - protein, 32 aa, Homo sapiens; identical to SEQ ID NO: 1966
  Table 4 sequence identifier: P21333_C1912
  MOD_RES (6)..(6): May or may not be conjugated to a chemical probe

SEQ ID NO: 7224 - protein, 32 aa, Homo sapiens; identical to SEQ ID NO: 1966
  Table 4 sequence identifier: P21333_C1920
  MOD_RES (14)..(14): May or may not be conjugated to a chemical probe

SEQ ID NO: 7225 - protein, 19 aa, Homo sapiens
  Table 4 sequence identifier: P00558_C379
  MOD_RES (15)..(15): May or may not be conjugated to a chemical probe
RGCITIIGGGDTATCCAKW

SEQ ID NO: 7226 - protein, 14 aa, Homo sapiens
  Table 4 sequence identifier: P19447_C342
  MOD_RES (9)..(9): May or may not be conjugated to a chemical probe
RSGVIVLPCGAGKS

SEQ ID NO: 7227 - protein, 18 aa, Homo sapiens
  Table 4 sequence identifier: P10809_C447
  MOD_RES (2)..(2): May or may not be conjugated to a chemical probe
RCIPALDSLTPANEDQKI

SEQ ID NO: 7228 - protein, 23 aa, Homo sapiens
  Table 4 sequence identifier: P54198_C882
  MOD_RES (12)..(12): May or may not be conjugated to a chemical probe
RSSLPSQDAMLCSGPLAIIQGRT

SEQ ID NO: 7229 - protein, 12 aa, Homo sapiens
  Table 4 sequence identifier: P15153_C157
  MOD_RES (5)..(5): May or may not be conjugated to a chemical probe
KYLECSALTQRG

SEQ ID NO: 7230 - protein, 17 aa, Homo sapiens
  Table 4 sequence identifier: P53618_C623
  MOD_RES (6)..(6): May or may not be conjugated to a chemical probe
KVLSECSPLMNDIFNKE

SEQ ID NO: 7231 - protein, 14 aa, Homo sapiens
  Table 4 sequence identifier: P07864_C163
  MOD_RES (7)..(7): May or may not be conjugated to a chemical probe
RVIGSGCNLDSARF

SEQ ID NO: 7232 - protein, 14 aa, Homo sapiens
  Table 4 sequence identifier: Q6ZMR3_C163
  MOD_RES (7)..(7): May or may not be conjugated to a chemical probe
RVIGSGCNLDSARF

SEQ ID NO: 7233 - protein, 15 aa, Homo sapiens
  Table 4 sequence identifier: P12268_C140
  MOD_RES (5)..(5): May or may not be conjugated to a chemical probe
RHGFCGIPITDTGRM

SEQ ID NO: 7234 - protein, 15 aa, Homo sapiens
  Table 4 sequence identifier: Q69YN4_C353
  MOD_RES (11)..(11): May or may not be conjugated to a chemical probe
RELVPLLYFSCPYKT

SEQ ID NO: 7235 - protein, 19 aa, Homo sapiens
  Table 4 sequence identifier: P00558_C380
  MOD_RES (16)..(16): May or may not be conjugated to a chemical probe
RGCITIIGGGDTATCCAKW

SEQ ID NO: 7236 - protein, 20 aa, Homo sapiens
  Table 4 sequence identifier: P15121_C299
  MOD_RES (3)..(3): May or may not be conjugated to a chemical probe
RVCALLSCTSHKDYPFHEEF

SEQ ID NO: 7237 - protein, 29 aa, Homo sapiens
  Table 4 sequence identifier: Q92888_C892
  MOD_RES (27)..(27): May or may not be conjugated to a chemical probe
RTQEIQENLLSLEETMKQLEELEEEFCRL

SEQ ID NO: 7238 - protein, 19 aa, Homo sapiens
  Table 4 sequence identifier: Q9BVQ7_C309
  MOD_RES (15)..(15): May or may not be conjugated to a chemical probe
RGPSLLFLDEMDALCPQRG

SEQ ID NO: 7239 - protein, 9 aa, Homo sapiens
  Table 4 sequence identifier: Q15149_C3110
  MOD_RES (3)..(3): May or may not be conjugated to a chemical probe
RLCFEGLRS

SEQ ID NO: 7240 - protein, 20 aa, Homo sapiens
  Table 4 sequence identifier: P17655_C82
  MOD_RES (7)..(7): May or may not be conjugated to a chemical probe
KRPTEICADPQFIIGGATRT

SEQ ID NO: 7241 - protein, 17 aa, Homo sapiens
  Table 4 sequence identifier: P50416_C304
  MOD_RES (10)..(10): May or may not be conjugated to a chemical probe
RLLGSTIPLCSAQWERM

SEQ ID NO: 7242 - protein, 39 aa, Homo sapiens; identical to SEQ ID NO: 1456
  Table 4 sequence identifier: Q92947_C289
  MOD_RES (33)..(33): May or may not be conjugated to a chemical probe

SEQ ID NO: 7243 - protein, 12 aa, Homo sapiens
  Table 4 sequence identifier: P60763_C157
  MOD_RES (5)..(5): May or may not be conjugated to a chemical probe
KYLECSALTQRG

SEQ ID NO: 7244 - protein, 12 aa, Homo sapiens
  Table 4 sequence identifier: P63000_C157
  MOD_RES (5)..(5): May or may not be conjugated to a chemical probe
KYLECSALTQRG

SEQ ID NO: 7245 - protein, 21 aa, Homo sapiens
  Table 4 sequence identifier: Q14141_C269
  MOD_RES (16)..(16): May or may not be conjugated to a chemical probe
RQYPWGTVQVENEAHCDFVKL

SEQ ID NO: 7246 - protein, 18 aa, Homo sapiens
  Table 4 sequence identifier: Q6IBS0_C141
  MOD_RES (6)..(6): May or may not be conjugated to a chemical probe
KHLSSCAAPAPLTSAERE

SEQ ID NO: 7247 - protein, 22 aa, Homo sapiens
  Table 4 sequence identifier: P46736_C273
  MOD_RES (4)..(4): May or may not be conjugated to a chemical probe
KNLCSQMSAVSGPLLQWLEDRL

SEQ ID NO: 7248 - protein, 16 aa, Homo sapiens
  Table 4 sequence identifier: O14641_C354
  MOD_RES (2)..(2): May or may not be conjugated to a chemical probe
KCWDPSPQAYFTLPRN

SEQ ID NO: 7249 - protein, 19 aa, Homo sapiens
  Table 4 sequence identifier: Q13423_C936
  MOD_RES (15)..(15): May or may not be conjugated to a chemical probe
REANSIIITPGYGLCAAKA

SEQ ID NO: 7250 - protein, 9 aa, Homo sapiens
  Table 4 sequence identifier: Q15027_C320
  MOD_RES (3)..(3): May or may not be conjugated to a chemical probe
KLCPDSERR

SEQ ID NO: 7251 - protein, 15 aa, Homo sapiens
  Table 4 sequence identifier: P22059_C224
  MOD_RES (8)..(8): May or may not be conjugated to a chemical probe
KVEDLSTCNDLIAKH

SEQ ID NO: 7252 - protein, 32 aa, Homo sapiens; identical to SEQ ID NO: 3347
  Table 4 sequence identifier: Q08945_C139
  MOD_RES (27)..(27): May or may not be conjugated to a chemical probe

SEQ ID NO: 7253 - protein, 19 aa, Homo sapiens
  Table 4 sequence identifier: P00558_C367
  MOD_RES (3)..(3): May or may not be conjugated to a chemical probe
RGCITIIGGGDTATCCAKW

SEQ ID NO: 7254 - protein, 9 aa, Homo sapiens
  Table 4 sequence identifier: P68366_C305
  MOD_RES (2)..(2): May or may not be conjugated to a chemical probe
KCDPRHGKY

SEQ ID NO: 7255 - protein, 9 aa, Homo sapiens
  Table 4 sequence identifier: Q71U36_C305
  MOD_RES (2)..(2): May or may not be conjugated to a chemical probe
KCDPRHGKY

SEQ ID NO: 7256 - protein, 11 aa, Homo sapiens
  Table 4 sequence identifier: P21333_C574
  MOD_RES (6)..(6): May or may not be conjugated to a chemical probe
KVGTECGNQKV

SEQ ID NO: 7257 - protein, 24 aa, Homo sapiens
  Table 4 sequence identifier: Q86XP3_C281
  MOD_RES (13)..(13): May or may not be conjugated to a chemical probe
RKSEYTQPTPIQCQGVPVALSGRD

SEQ ID NO: 7258 - protein, 11 aa, Homo sapiens
  Table 4 sequence identifier: Q9UL46_C91
  MOD_RES (2)..(2): May or may not be conjugated to a chemical probe
KCGFLPGNEKV

SEQ ID NO: 7259 - protein, 13 aa, Homo sapiens
  Table 4 sequence identifier: Q92598_C34
  MOD_RES (2)..(2): May or may not be conjugated to a chemical probe
RCTPSVISFGSKN

SEQ ID NO: 7260 - protein, 10 aa, Homo sapiens
  Table 4 sequence identifier: Q16186_C88
  MOD_RES (5)..(5): May or may not be conjugated to a chemical probe
RVPQCPSGRV

SEQ ID NO: 7261 - protein, 19 aa, Homo sapiens
  Table 4 sequence identifier: P21333_C478
  MOD_RES (12)..(12): May or may not be conjugated to a chemical probe
RSPYTVTVGQACNPSACRA

SEQ ID NO: 7262 - protein, 19 aa, Homo sapiens
  Table 4 sequence identifier: P21333_C483
  MOD_RES (17)..(17): May or may not be conjugated to a chemical probe
RSPYTVTVGQACNPSACRA

SEQ ID NO: 7263 - protein, 14 aa, Homo sapiens
  Table 4 sequence identifier: P40926_C212
  MOD_RES (10)..(10): May or may not be conjugated to a chemical probe
KTIIPLISQCTPKV

SEQ ID NO: 7264 - protein, 27 aa, Homo sapiens
  Table 4 sequence identifier: P47756_C36
  MOD_RES (14)..(14): May or may not be conjugated to a chemical probe
KNLSDLIDLVPSLCEDLLSSVDQPLKI

SEQ ID NO: 7265 - protein, 10 aa, Homo sapiens
  Table 4 sequence identifier: P12270_C1068
  MOD_RES (4)..(4): May or may not be conjugated to a chemical probe
RRDCQEQAKI

SEQ ID NO: 7266 - protein, 17 aa, Homo sapiens
  Table 4 sequence identifier: O43707_C499
  MOD_RES (3)..(3): May or may not be conjugated to a chemical probe
KICDQWDALGSLTHSRR

SEQ ID NO: 7267 - protein, 23 aa, Homo sapiens
  Table 4 sequence identifier: Q5VSL9_C798
  MOD_RES (14)..(14): May or may not be conjugated to a chemical probe
RAHSNPDFLPVDNCLQSVLGQRV

SEQ ID NO: 7268 - protein, 17 aa, Homo sapiens
  Table 4 sequence identifier: P19367_C834
  MOD_RES (6)..(6): May or may not be conjugated to a chemical probe
RAAQLCGAGMAAVVDKI

SEQ ID NO: 7269 - protein, 17 aa, Homo sapiens
  Table 4 sequence identifier: Q8N9T8_C673
  MOD_RES (12)..(12): May or may not be conjugated to a chemical probe
RLLGPTVMLGGCEFSRQ

SEQ ID NO: 7270 - protein, 27 aa, Homo sapiens
  Table 4 sequence identifier: P68371_C239
  MOD_RES (24)..(24): May or may not be conjugated to a chemical probe
KLTTPTYGDLNHLVSATMSGVTTCLRF

SEQ ID NO: 7271 - protein, 27 aa, Homo sapiens
  Table 4 sequence identifier: Q9BVA1_C239
  MOD_RES (24)..(24): May or may not be conjugated to a chemical probe
KLTTPTYGDLNHLVSATMSGVTTCLRF

SEQ ID NO: 7272 - protein, 27 aa, Homo sapiens
  Table 4 sequence identifier: P07437_C239
  MOD_RES (24)..(24): May or may not be conjugated to a chemical probe
KLTTPTYGDLNHLVSATMSGVTTCLRF

SEQ ID NO: 7273 - protein, 23 aa, Homo sapiens
  Table 4 sequence identifier: P35579_C896
  MOD_RES (15)..(15): May or may not be conjugated to a chemical probe
KLQLQEQLQAETELCAEAEELRA

SEQ ID NO: 7274 - protein, 13 aa, Homo sapiens
  Table 4 sequence identifier: Q9Y2H1_C235
  MOD_RES (8)..(8): May or may not be conjugated to a chemical probe
KLSDFGLCTGLKK

SEQ ID NO: 7275 - protein, 13 aa, Homo sapiens
  Table 4 sequence identifier: Q15208_C234
  MOD_RES (8)..(8): May or may not be conjugated to a chemical probe
KLSDFGLCTGLKK

SEQ ID NO: 7276 - protein, 11 aa, Homo sapiens
  Table 4 sequence identifier: Q9UNM6_C357
  MOD_RES (6)..(6): May or may not be conjugated to a chemical probe
RLEFWCTDVKS

SEQ ID NO: 7277 - protein, 10 aa, Homo sapiens
  Table 4 sequence identifier: Q8N8A2_C921
  MOD_RES (2)..(2): May or may not be conjugated to a chemical probe
KCALLILDKI

SEQ ID NO: 7278 - protein, 25 aa, Homo sapiens
  Table 4 sequence identifier: Q14669_C1959
  MOD_RES (19)..(19): May or may not be conjugated to a chemical probe
KTFESTENPDDFLPSVMTCVNYLKL

SEQ ID NO: 7279 - protein, 31 aa, Homo sapiens
  Table 4 sequence identifier: Q8IV53_C21
  MOD_RES (18)..(18): May or may not be conjugated to a chemical probe
RAEGGSPAVFDWFFEAACPASLQEDPPILRQ

SEQ ID NO: 7280 - protein, 24 aa, Homo sapiens
  Table 4 sequence identifier: Q86X10_C327
  MOD_RES (21)..(21): May or may not be conjugated to a chemical probe
KFQEQFLNVSGMPQELNQYPCLKH

SEQ ID NO: 7281 - protein, 26 aa, Homo sapiens
  Table 4 sequence identifier: P0CB43_C368
  MOD_RES (24)..(24): May or may not be conjugated to a chemical probe
RGMENLLEVQVPEDVEQQLQQLDCRE

SEQ ID NO: 7282 - protein, 40 aa, Homo sapiens; identical to SEQ ID NO: 3438
  Table 4 sequence identifier: Q9Y490_C1434
  MOD_RES (4)..(4): May or may not be conjugated to a chemical probe

SEQ ID NO: 7283 - protein, 20 aa, Homo sapiens
  Table 4 sequence identifier: O00499_C47
  MOD_RES (13)..(13): May or may not be conjugated to a chemical probe
KADETKDEQFEQCVQNFNKQ

SEQ ID NO: 7284 - protein, 18 aa, Homo sapiens
  Table 4 sequence identifier: O15067_C66
  MOD_RES (8)..(8): May or may not be conjugated to a chemical probe
KLMWLFGCPLLLDDVARE

SEQ ID NO: 7285 - protein, 11 aa, Homo sapiens
  Table 4 sequence identifier: Q01082_C112
  MOD_RES (4)..(4): May or may not be conjugated to a chemical probe
RIHCLENVDKA

SEQ ID NO: 7286 - protein, 9 aa, Homo sapiens
  Table 4 sequence identifier: Q92793_C1219
  MOD_RES (4)..(4): May or may not be conjugated to a chemical probe
KQLCTIPRD

SEQ ID NO: 7287 - protein, 9 aa, Homo sapiens
  Table 4 sequence identifier: Q09472_C1183
  MOD_RES (4)..(4): May or may not be conjugated to a chemical probe
KQLCTIPRD

SEQ ID NO: 7288 - protein, 38 aa, Homo sapiens; identical to SEQ ID NO: 1591
  Table 4 sequence identifier: Q16181_C126
  MOD_RES (26)..(26): May or may not be conjugated to a chemical probe

SEQ ID NO: 7289 - protein, 18 aa, Homo sapiens
  Table 4 sequence identifier: Q14289_C972
  MOD_RES (15)..(15): May or may not be conjugated to a chemical probe
RLAQQNAVTSLSEECKRQ

SEQ ID NO: 7290 - protein, 21 aa, Homo sapiens
  Table 4 sequence identifier: Q9H3P2_C131
  MOD_RES (5)..(5): May or may not be conjugated to a chemical probe
KVGECEASAMLPLECQYLNKN

SEQ ID NO: 7291 - protein, 21 aa, Homo sapiens
  Table 4 sequence identifier: Q9H3P2_C141
  MOD_RES (15)..(15): May or may not be conjugated to a chemical probe
KVGECEASAMLPLECQYLNKN

SEQ ID NO: 7292 - protein, 27 aa, Homo sapiens
  Table 4 sequence identifier: Q92570_C397
  MOD_RES (19)..(19): May or may not be conjugated to a chemical probe
KSPLQQEPSQPSPPSPPICMMNALVRA

SEQ ID NO: 7293 - protein, 12 aa, Homo sapiens
  Table 4 sequence identifier: Q14204_C633
  MOD_RES (10)..(10): May or may not be conjugated to a chemical probe
KVQYPQSQACKM

SEQ ID NO: 7294 - protein, 13 aa, Homo sapiens
  Table 4 sequence identifier: P15880_C229
  MOD_RES (3)..(3): May or may not be conjugated to a chemical probe
RGCTATLGNFAKA

SEQ ID NO: 7295 - protein, 25 aa, Homo sapiens
  Table 4 sequence identifier: Q12906_C278
  MOD_RES (5)..(5): May or may not be conjugated to a chemical probe
RVLECLASGIVMPDGSGIYDPCEKE

SEQ ID NO: 7296 - protein, 25 aa, Homo sapiens
  Table 4 sequence identifier: Q12906_C295
  MOD_RES (22)..(22): May or may not be conjugated to a chemical probe
RVLECLASGIVMPDGSGIYDPCEKE

SEQ ID NO: 7297 - protein, 24 aa, Homo sapiens
  Table 4 sequence identifier: P27348_C237
  MOD_RES (16)..(16): May or may not be conjugated to a chemical probe
RDNLTLWTSDSAGEECDAAEGAEN

SEQ ID NO: 7298 - protein, 20 aa, Homo sapiens
  Table 4 sequence identifier: Q9UHD8_C531
  MOD_RES (13)..(13): May or may not be conjugated to a chemical probe
KWGTIEVENTTHCEFAYLRD

SEQ ID NO: 7299 - protein, 14 aa, Homo sapiens
  Table 4 sequence identifier: P16152_C227
  MOD_RES (8)..(8): May or may not be conjugated to a chemical probe
KILLNACCPGWVRT

SEQ ID NO: 7300 - protein, 13 aa, Homo sapiens
  Table 4 sequence identifier: P05455_C245
  MOD_RES (11)..(11): May or may not be conjugated to a chemical probe
KFSGDLDDQTCRE

SEQ ID NO: 7301 - protein, 18 aa, Homo sapiens
  Table 4 sequence identifier: P50995_C294
  MOD_RES (9)..(9): May or may not be conjugated to a chemical probe
KGVGTDEACLIEILASRS

SEQ ID NO: 7302 - protein, 23 aa, Homo sapiens
  Table 4 sequence identifier: P42765_C382
  MOD_RES (8)..(8): May or may not be conjugated to a chemical probe
KYAVGSACIGGGQGIAVIIQSTA

SEQ ID NO: 7303 - protein, 28 aa, Homo sapiens
  Table 4 sequence identifier: Q06323_C101
  MOD_RES (19)..(19): May or may not be conjugated to a chemical probe
KEDKDEKKKGEDEDKGPPCGPVNCNEKI

SEQ ID NO: 7304 - protein, 22 aa, Homo sapiens
  Table 4 sequence identifier: Q06323_C106
  MOD_RES (18)..(18): May or may not be conjugated to a chemical probe
KKKGEDEDKGPPCGPVNCNEKI

SEQ ID NO: 7305 - protein, 20 aa, Homo sapiens
  Table 4 sequence identifier: P68036_C86
  MOD_RES (5)..(5): May or may not be conjugated to a chemical probe
KGQVCLPVISAENWKPATKT

SEQ ID NO: 7306 - protein, 24 aa, Homo sapiens
  Table 4 sequence identifier: Q9P0J1_C151
  MOD_RES (16)..(16): May or may not be conjugated to a chemical probe
RGMLLGVFDGHAGCACSQAVSERL

SEQ ID NO: 7307 - protein, 28 aa, Homo sapiens
  Table 4 sequence identifier: Q92973_C285
  MOD_RES (14)..(14): May or may not be conjugated to a chemical probe
RTQDQDENVALEACEFWLTLAEQPICKD

SEQ ID NO: 7308 - protein, 18 aa, Homo sapiens
  Table 4 sequence identifier: Q86UX7_C128
  MOD_RES (16)..(16): May or may not be conjugated to a chemical probe
RASFSQPLFQAVAAICRL

SEQ ID NO: 7309 - protein, 27 aa, Homo sapiens
  Table 4 sequence identifier: Q9Y5T5_C205
  MOD_RES (10)..(10): May or may not be conjugated to a chemical probe
KGLSNLGNTCFFNAVMQNLSQTPVLRE

SEQ ID NO: 7310 - protein, 19 aa, Homo sapiens
  Table 4 sequence identifier: Q15149_C4071
  MOD_RES (8)..(8): May or may not be conjugated to a chemical probe
KFLEGTSCIAGVFVDATKE

SEQ ID NO: 7311 - protein, 17 aa, Homo sapiens
  Table 4 sequence identifier: Q9NP80_C714
  MOD_RES (7)..(7): May or may not be conjugated to a chemical probe
RFNPVMCENIPLDESRN

SEQ ID NO: 7312 - protein, 11 aa, Homo sapiens
  Table 4 sequence identifier: P13796_C140
  MOD_RES (9)..(9): May or may not be conjugated to a chemical probe
KALENDPDCRH

SEQ ID NO: 7313 - protein, 23 aa, Homo sapiens
  Table 4 sequence identifier: O14647_C365
  MOD_RES (12)..(12): May or may not be conjugated to a chemical probe
KVSPEDVEYFNCQQELASELNKQ

SEQ ID NO: 7314 - protein, 28 aa, Homo sapiens
  Table 4 sequence identifier: Q92973_C297
  MOD_RES (26)..(26): May or may not be conjugated to a chemical probe
RTQDQDENVALEACEFWLTLAEQPICKD

SEQ ID NO: 7315 - protein, 23 aa, Homo sapiens
  Table 4 sequence identifier: P13489_C95
  MOD_RES (7)..(7): May or may not be conjugated to a chemical probe
KLSLQNCCLTGAGCGVLSSTLRT

SEQ ID NO: 7316 - protein, 23 aa, Homo sapiens
  Table 4 sequence identifier: P13489_C96
  MOD_RES (8)..(8): May or may not be conjugated to a chemical probe
KLSLQNCCLTGAGCGVLSSTLRT

SEQ ID NO: 7317 - protein, 12 aa, Homo sapiens
  Table 4 sequence identifier: Q9HC35_C820
  MOD_RES (9)..(9): May or may not be conjugated to a chemical probe
KVHLFQYPCSKA

SEQ ID NO: 7318 - protein, 33 aa, Homo sapiens; identical to SEQ ID NO: 2681
  Table 4 sequence identifier: P08107_C603
  MOD_RES (7)..(7): May or may not be conjugated to a chemical probe

SEQ ID NO: 7319 - protein, 26 aa, Homo sapiens
  Table 4 sequence identifier: P30510_C345
  MOD_RES (5)..(5): May or may not be conjugated to a chemical probe
KGGSCSQAASSNSAQGSDESLIACKA

SEQ ID NO: 7320 - protein, 26 aa, Homo sapiens
  Table 4 sequence identifier: Q29865_C345
  MOD_RES (5)..(5): May or may not be conjugated to a chemical probe
KGGSCSQAASSNSAQGSDESLIACKA

SEQ ID NO: 7321 - protein, 26 aa, Homo sapiens
  Table 4 sequence identifier: P30504_C345
  MOD_RES (5)..(5): May or may not be conjugated to a chemical probe
KGGSCSQAASSNSAQGSDESLIACKA

SEQ ID NO: 7322 - protein, 16 aa, Homo sapiens
  Table 4 sequence identifier: Q00653_C432
  MOD_RES (5)..(5): May or may not be conjugated to a chemical probe
RTPQCEPQAPEMLQRA

SEQ ID NO: 7323 - protein, 12 aa, Homo sapiens
  Table 4 sequence identifier: Q96GX9_C16
  MOD_RES (2)..(2): May or may not be conjugated to a chemical probe
RCGAQDKEHPRY

SEQ ID NO: 7324 - protein, 14 aa, Homo sapiens
  Table 4 sequence identifier: P16152_C226
  MOD_RES (7)..(7): May or may not be conjugated to a chemical probe
KILLNACCPGWVRT

SEQ ID NO: 7325 - protein, 11 aa, Homo sapiens
  Table 4 sequence identifier: P13797_C143
  MOD_RES (9)..(9): May or may not be conjugated to a chemical probe
KALENDPDCRH

SEQ ID NO: 7326 - protein, 26 aa, Homo sapiens
  Table 4 sequence identifier: Q9TNN7_C345
  MOD_RES (5)..(5): May or may not be conjugated to a chemical probe
KGGSCSQAASSNSAQGSDESLIACKA

SEQ ID NO: 7327 - protein, 26 aa, Homo sapiens
  Table 4 sequence identifier: Q29963_C345
  MOD_RES (5)..(5): May or may not be conjugated to a chemical probe
KGGSCSQAASSNSAQGSDESLIACKA

SEQ ID NO: 7328 - protein, 26 aa, Homo sapiens
  Table 4 sequence identifier: Q29960_C345
  MOD_RES (5)..(5): May or may not be conjugated to a chemical probe
KGGSCSQAASSNSAQGSDESLIACKA

SEQ ID NO: 7329 - protein, 26 aa, Homo sapiens
  Table 4 sequence identifier: Q07000_C345
  MOD_RES (5)..(5): May or may not be conjugated to a chemical probe
KGGSCSQAASSNSAQGSDESLIACKA

SEQ ID NO: 7330 - protein, 9 aa, Homo sapiens
  Table 4 sequence identifier: P14678_C19
  MOD_RES (2)..(2): May or may not be conjugated to a chemical probe
RCILQDGRI

SEQ ID NO: 7331 - protein, 9 aa, Homo sapiens
  Table 4 sequence identifier: P63162_C19
  MOD_RES (2)..(2): May or may not be conjugated to a chemical probe
RCILQDGRI

SEQ ID NO: 7332 - protein, 22 aa, Homo sapiens
  Table 4 sequence identifier: O14950_C109
  MOD_RES (6)..(6): May or may not be conjugated to a chemical probe
RNAFACFDEEATGTIQEDYLRE

SEQ ID NO: 7333 - protein, 27 aa, Homo sapiens
  Table 4 sequence identifier: P14618_C358
  MOD_RES (17)..(17): May or may not be conjugated to a chemical probe
RAEGSDVANAVLDGADCIMLSGETAKG

SEQ ID NO: 7334 - protein, 26 aa, Homo sapiens
  Table 4 sequence identifier: O14733_C131
  MOD_RES (20)..(20): May or may not be conjugated to a chemical probe
RYQAEINDLENLGEMGSGTCGQVWKM

SEQ ID NO: 7335 - protein, 12 aa, Homo sapiens
  Table 4 sequence identifier: P62701_C41
  MOD_RES (3)..(3): May or may not be conjugated to a chemical probe
RECLPLIIFLRN

SEQ ID NO: 7336 - protein, 30 aa, Homo sapiens; identical to SEQ ID NO: 1051
  Table 4 sequence identifier: P60709_C257
  MOD_RES (2)..(2): May or may not be conjugated to a chemical probe

SEQ ID NO: 7337 - protein, 30 aa, Homo sapiens; identical to SEQ ID NO: 1051
  Table 4 sequence identifier: P60709_C272
  MOD_RES (17)..(17): May or may not be conjugated to a chemical probe

SEQ ID NO: 7338 - protein, 17 aa, Homo sapiens
  Table 4 sequence identifier: Q8N7H5_C36
  MOD_RES (5)..(5): May or may not be conjugated to a chemical probe
RVKYCNSLPDIPFDPKF

SEQ ID NO: 7339 - protein, 16 aa, Homo sapiens
  Table 4 sequence identifier: Q9UBB5_C359
  MOD_RES (14)..(14): May or may not be conjugated to a chemical probe
KNPAVWLNTSQPLCKA

SEQ ID NO: 7340 - protein, 24 aa, Homo sapiens
  Table 4 sequence identifier: P21964_C223
  MOD_RES (12)..(12): May or may not be conjugated to a chemical probe
KGTVLLADNVICPGAPDFLAHVRG

SEQ ID NO: 7341 - protein, 14 aa, Homo sapiens
  Table 4 sequence identifier: Q9BVQ7_C509
  MOD_RES (11)..(11): May or may not be conjugated to a chemical probe
KGVLLYGPPGCAKT

SEQ ID NO: 7342 - protein, 16 aa, Homo sapiens
  Table 4 sequence identifier: P61247_C201
  MOD_RES (3)..(3): May or may not be conjugated to a chemical probe
KACQSIYPLHDVFVRK

SEQ ID NO: 7343 - protein, 21 aa, Homo sapiens
  Table 4 sequence identifier: Q9Y3D5_C90
  MOD_RES (16)..(16): May or may not be conjugated to a chemical probe
KNVQLLSQFVSPFTGCIYGRH

SEQ ID NO: 7344 - protein, 12 aa, Homo sapiens
  Table 4 sequence identifier: P48735_C308
  MOD_RES (10)..(10): May or may not be conjugated to a chemical probe
KSSGGFVWACKN

SEQ ID NO: 7345 - protein, 34 aa, Homo sapiens; identical to SEQ ID NO: 1073
  Table 4 sequence identifier: P84243_C111
  MOD_RES (28)..(28): May or may not be conjugated to a chemical probe

SEQ ID NO: 7346 - protein, 26 aa, Homo sapiens
  Table 4 sequence identifier: P37198_C475
  MOD_RES (24)..(24): May or may not be conjugated to a chemical probe
KDIIEHLNTSGAPADTSDPLQQICKI

SEQ ID NO: 7347 - protein, 39 aa, Homo sapiens; identical to SEQ ID NO: 1399
  Table 4 sequence identifier: P61158_C307
  MOD_RES (33)..(33): May or may not be conjugated to a chemical probe

SEQ ID NO: 7348 - protein, 15 aa, Homo sapiens
  Table 4 sequence identifier: P35754_C23
  MOD_RES (10)..(10): May or may not be conjugated to a chemical probe
KVVVFIKPTCPYCRR

SEQ ID NO: 7349 - protein, 14 aa, Homo sapiens
  Table 4 sequence identifier: Q9Y5B9_C574
  MOD_RES (6)..(6): May or may not be conjugated to a chemical probe
RINFYCPGSALGRN

SEQ ID NO: 7350 - protein, 31 aa, Homo sapiens; identical to SEQ ID NO: 3396
  Table 4 sequence identifier: P22102_C237
  MOD_RES (18)..(18): May or may not be conjugated to a chemical probe

SEQ ID NO: 7351 - protein, 34 aa, Homo sapiens
  Table 4 sequence identifier: Q01780_C612
  MOD_RES (12)..(12): May or may not be conjugated to a chemical probe
RLENVLFGPHDCSHAPPDGYPIIPTSGSVPVQKQ

SEQ ID NO: 7352 - protein, 25 aa, Homo sapiens
  Table 4 sequence identifier: Q7Z5K2_C293
  MOD_RES (23)..(23): May or may not be conjugated to a chemical probe
RLENLNEAIEEDIVQSVLRPTNCRT

SEQ ID NO: 7353 - protein, 26 aa, Homo sapiens
  Table 4 sequence identifier: P39687_C87
  MOD_RES (13)..(13): May or may not be conjugated to a chemical probe
RVSGGLEVLAEKCPNLTHLNLSGNKI

SEQ ID NO: 7354 - protein, 21 aa, Homo sapiens
  Table 4 sequence identifier: P49588_C947
  MOD_RES (5)..(5): May or may not be conjugated to a chemical probe
KNVGCLQEALQLATSFAQLRL

SEQ ID NO: 7355 - protein, 24 aa, Homo sapiens
  Table 4 sequence identifier: Q9GZR2_C382
  MOD_RES (13)..(13): May or may not be conjugated to a chemical probe
KILGLQVQQAEHCSIQDAQAAMRL

SEQ ID NO: 7356 - protein, 13 aa, Homo sapiens
  Table 4 sequence identifier: H3BQZ7_C408
  MOD_RES (3)..(3): May or may not be conjugated to a chemical probe
KNCVVELNFGQKE

SEQ ID NO: 7357 - protein, 13 aa, Homo sapiens
  Table 4 sequence identifier: Q1KMD3_C408
  MOD_RES (3)..(3): May or may not be conjugated to a chemical probe
KNCVVELNFGQKE

SEQ ID NO: 7358 - protein, 8 aa, Homo sapiens
  Table 4 sequence identifier: Q00325_C237
  MOD_RES (4)..(4): May or may not be conjugated to a chemical probe
KFACFERT

SEQ ID NO: 7359 - protein, 25 aa, Homo sapiens
  Table 4 sequence identifier: Q8TEM1_C767
  MOD_RES (17)..(17): May or may not be conjugated to a chemical probe
RLTLAPVYTSPQLDMSCPLLQQNKQ

SEQ ID NO: 7360 - protein, 14 aa, Homo sapiens
  Table 4 sequence identifier: P62753_C12
  MOD_RES (11)..(11): May or may not be conjugated to a chemical probe
KLNISFPATGCQKL

SEQ ID NO: 7361 - protein, 17 aa, Homo sapiens
  Table 4 sequence identifier: O95487_C562
  MOD_RES (2)..(2): May or may not be conjugated to a chemical probe
RCTLTNIPQTQALLNKA

SEQ ID NO: 7362 - protein, 12 aa, Homo sapiens
  Table 4 sequence identifier: P17844_C200
  MOD_RES (4)..(4): May or may not be conjugated to a chemical probe
KSTCIYGGAPKG

SEQ ID NO: 7363 - protein, 12 aa, Homo sapiens
  Table 4 sequence identifier: Q92841_C277
  MOD_RES (4)..(4): May or may not be conjugated to a chemical probe
KSTCIYGGAPKG

SEQ ID NO: 7364 - protein, 13 aa, Homo sapiens
  Table 4 sequence identifier: O75533_C1035
  MOD_RES (6)..(6): May or may not be conjugated to a chemical probe
KVQENCIDLVGRI

SEQ ID NO: 7365 - protein, 20 aa, Homo sapiens
  Table 4 sequence identifier: P62280_C131
  MOD_RES (14)..(14): May or may not be conjugated to a chemical probe
RDVQIGDIVTVGECRPLSKT

SEQ ID NO: 7366 - protein, 16 aa, Homo sapiens
  Table 4 sequence identifier: Q9Y3L3_C102
  MOD_RES (7)..(7): May or may not be conjugated to a chemical probe
KALEMSCAIQNQLARI

SEQ ID NO: 7367 - protein, 12 aa, Homo sapiens
  Table 4 sequence identifier: Q13148_C50
  MOD_RES (9)..(9): May or may not be conjugated to a chemical probe
RYRNPVSQCMRG

SEQ ID NO: 7368 - protein, 13 aa, Homo sapiens
  Table 4 sequence identifier: P14649_C89
  MOD_RES (7)..(7): May or may not be conjugated to a chemical probe
KILYSQCGDVMRA

SEQ ID NO: 7369 - protein, 13 aa, Homo sapiens
  Table 4 sequence identifier: P60660_C32
  MOD_RES (7)..(7): May or may not be conjugated to a chemical probe
KILYSQCGDVMRA

SEQ ID NO: 7370 - protein, 12 aa, Homo sapiens
  Table 4 sequence identifier: P62910_C91
  MOD_RES (9)..(9): May or may not be conjugated to a chemical probe
KELEVLLMCNKS

SEQ ID NO: 7371 - protein, 13 aa, Homo sapiens
  Table 4 sequence identifier: P21333_C1157
  MOD_RES (7)..(7): May or may not be conjugated to a chemical probe
KAHVVPCFDASKV

SEQ ID NO: 7372 - protein, 28 aa, Homo sapiens
  Table 4 sequence identifier: Q9BWD1_C88
  MOD_RES (18)..(18): May or may not be conjugated to a chemical probe
RQASVGAGIPYSVPAWSCQMICGSGLKA

SEQ ID NO: 7373 - protein, 28 aa, Homo sapiens
  Table 4 sequence identifier: Q9BWD1_C92
  MOD_RES (22)..(22): May or may not be conjugated to a chemical probe
RQASVGAGIPYSVPAWSCQMICGSGLKA

SEQ ID NO: 7374 - protein, 11 aa, Homo sapiens
  Table 4 sequence identifier: Q8WWP7_C181
  MOD_RES (7)..(7): May or may not be conjugated to a chemical probe
RELVAECGGRV

SEQ ID NO: 7375 - protein, 45 aa, Homo sapiens; identical to SEQ ID NO: 1119
  Table 4 sequence identifier: P05386_C61
  MOD_RES (13)..(13): May or may not be conjugated to a chemical probe

SEQ ID NO: 7376 - protein, 21 aa, Homo sapiens
  Table 4 sequence identifier: P07900_C374
  MOD_RES (8)..(8): May or may not be conjugated to a chemical probe
RVFIMDNCEELIPEYLNFIRG

SEQ ID NO: 7377 - protein, 16 aa, Homo sapiens
  Table 4 sequence identifier: O75694_C974
  MOD_RES (2)..(2): May or may not be conjugated to a chemical probe
KCITDTLQELVNQSKA

SEQ ID NO: 7378 - protein, 22 aa, Homo sapiens
  Table 4 sequence identifier: Q9NZ32_C388
  MOD_RES (6)..(6): May or may not be conjugated to a chemical probe
RIPDWCSLNNPPLEMMFDVGKT

SEQ ID NO: 7379 - protein, 19 aa, Homo sapiens
  Table 4 sequence identifier: P14618_C326
  MOD_RES (8)..(8): May or may not be conjugated to a chemical probe
RAGKPVICATQMLESMIKK

SEQ ID NO: 7380 - protein, 18 aa, Homo sapiens
  Table 4 sequence identifier: Q9BZL6_C217
  MOD_RES (10)..(10): May or may not be conjugated to a chemical probe
RLGTSESLPCTAEELSRS

SEQ ID NO: 7381 - protein, 31 aa, Homo sapiens; identical to SEQ ID NO: 5108
  Table 4 sequence identifier: Q9Y490_C709
  MOD_RES (18)..(18): May or may not be conjugated to a chemical probe

SEQ ID NO: 7382 - protein, 31 aa, Homo sapiens; identical to SEQ ID NO: 5108
  Table 4 sequence identifier: Q9Y490_C719
  MOD_RES (28)..(28): May or may not be conjugated to a chemical probe

SEQ ID NO: 7383 - protein, 12 aa, Homo sapiens
  Table 4 sequence identifier: A6NHR9_C505
  MOD_RES (8)..(8): May or may not be conjugated to a chemical probe
RGLAPIECYNRI

SEQ ID NO: 7384 - protein, 23 aa, Homo sapiens
  Table 4 sequence identifier: P18669_C153
  MOD_RES (13)..(13): May or may not be conjugated to a chemical probe
RYADLTEDQLPSCESLKDTIARA

SEQ ID NO: 7385 - protein, 17 aa, Homo sapiens
  Table 4 sequence identifier: Q99973_C149
  MOD_RES (7)..(7): May or may not be conjugated to a chemical probe
RVNNSNCLLSEPPSWRA

SEQ ID NO: 7386 - protein, 17 aa, Homo sapiens
  Table 4 sequence identifier: P31150_C202
  MOD_RES (10)..(10): May or may not be conjugated to a chemical probe
RTDDYLDQPCLETVNRI

SEQ ID NO: 7387 - protein, 21 aa, Homo sapiens
  Table 4 sequence identifier: Q96S15_C474
  MOD_RES (8)..(8): May or may not be conjugated to a chemical probe
RANPEGLCYGLFGDLAFAAKE

SEQ ID NO: 7388 - protein, 31 aa, Homo sapiens
  Table 4 sequence identifier: A0FGR8_C611
  MOD_RES (7)..(7): May or may not be conjugated to a chemical probe
RDEQHQCSLGNLKVPLSQLLTSEDMTVSQRF

SEQ ID NO: 7389 - protein, 17 aa, Homo sapiens
  Table 4 sequence identifier: P49792_C348
  MOD_RES (14)..(14): May or may not be conjugated to a chemical probe
KGEAGQNLLEMMACDRL

SEQ ID NO: 7390 - protein, 15 aa, Homo sapiens
  Table 4 sequence identifier: Q9Y6C9_C79
  MOD_RES (3)..(3): May or may not be conjugated to a chemical probe
RLCSGVLGTVVHGKV

SEQ ID NO: 7391 - protein, 12 aa, Homo sapiens
  Table 4 sequence identifier: Q9Y3L3_C388
  MOD_RES (9)..(9): May or may not be conjugated to a chemical probe
RLQALQEVCSRL

SEQ ID NO: 7392 - protein, 20 aa, Homo sapiens
  Table 4 sequence identifier: P47755_C111
  MOD_RES (9)..(9): May or may not be conjugated to a chemical probe
KEATDPRPCEVENAVESWRT

SEQ ID NO: 7393 - protein, 27 aa, Homo sapiens
  Table 4 sequence identifier: Q86W42_C314
  MOD_RES (25)..(25): May or may not be conjugated to a chemical probe
KAQVPGSSPGLLSLSLNQQPAAPECKV

SEQ ID NO: 7394 - protein, 28 aa, Homo sapiens
  Table 4 sequence identifier: P38646_C317
  MOD_RES (4)..(4): May or may not be conjugated to a chemical probe
KAKCELSSSVQTDINLPYLTMDSSGPKH

SEQ ID NO: 7395 - protein, 14 aa, Homo sapiens
  Table 4 sequence identifier: Q9UID3_C190
  MOD_RES (2)..(2): May or may not be conjugated to a chemical probe
KCVELGAYGQAVRY

SEQ ID NO: 7396 - protein, 10 aa, Homo sapiens
  Table 4 sequence identifier: Q9Y2Q3_C176
  MOD_RES (8)..(8): May or may not be conjugated to a chemical probe
KETTEAACRY

SEQ ID NO: 7397 - protein, 14 aa, Homo sapiens
  Table 4 sequence identifier: Q86XR8_C285
  MOD_RES (3)..(3): May or may not be conjugated to a chemical probe
RLCLGDMPFVAGKS

SEQ ID NO: 7398 - protein, 24 aa, Homo sapiens
  Table 4 sequence identifier: P21281_C162
  MOD_RES (22)..(22): May or may not be conjugated to a chemical probe
RGPVVLAEDFLDIMGQPINPQCRI

SEQ ID NO: 7399 - protein, 10 aa, Homo sapiens
  Table 4 sequence identifier: Q86UV5_C39
  MOD_RES (7)..(7): May or may not be conjugated to a chemical probe
RIWLEPCIRG

SEQ ID NO: 7400 - protein, 10 aa, Homo sapiens
  Table 4 sequence identifier: P35579_C671
  MOD_RES (2)..(2): May or may not be conjugated to a chemical probe
RCIIPNHEKK

SEQ ID NO: 7401 - protein, 15 aa, Homo sapiens
  Table 4 sequence identifier: P10809_C237
  MOD_RES (2)..(2): May or may not be conjugated to a chemical probe
KCEFQDAYVLLSEKK

SEQ ID NO: 7402 - protein, 25 aa, Homo sapiens
  Table 4 sequence identifier: P35611_C68
  MOD_RES (12)..(12): May or may not be conjugated to a chemical probe
RVSMILQSPAFCEELESMIQEQFKK

SEQ ID NO: 7403 - protein, 29 aa, Homo sapiens
  Table 4 sequence identifier: Q9H4M9_C138
  MOD_RES (4)..(4): May or may not be conjugated to a chemical probe
RFMCAQLPNPVLDSISIIDTPGILSGEKQ

SEQ ID NO: 7404 - protein, 35 aa, Homo sapiens; identical to SEQ ID NO: 1226
  Table 4 sequence identifier: O60828_C60
  MOD_RES (7)..(7): May or may not be conjugated to a chemical probe

SEQ ID NO: 7405 - protein, 17 aa, Homo sapiens
  Table 4 sequence identifier: Q9P289_C392
  MOD_RES (10)..(10): May or may not be conjugated to a chemical probe
KSIAVAEAACPGITDKM

SEQ ID NO: 7406 - protein, 18 aa, Homo sapiens
  Table 4 sequence identifier: P28838_C376
  MOD_RES (9)..(9): May or may not be conjugated to a chemical probe
RLILADALCYAHTFNPKV

SEQ ID NO: 7407 - protein, 18 aa, Homo sapiens
  Table 4 sequence identifier: P55265_C851
  MOD_RES (2)..(2): May or may not be conjugated to a chemical probe
RCFNTLTNSFQPSLLGRK

SEQ ID NO: 7408 - protein, 14 aa, Homo sapiens
  Table 4 sequence identifier: Q8WXH0_C39
  MOD_RES (5)..(5): May or may not be conjugated to a chemical probe
KAFTCWINSQLARH

SEQ ID NO: 7409 - protein, 14 aa, Homo sapiens
  Table 4 sequence identifier: P50991_C252
  MOD_RES (8)..(8): May or may not be conjugated to a chemical probe
KIGLIQFCLSAPKT

SEQ ID NO: 7410 - protein, 22 aa, Homo sapiens
  Table 4 sequence identifier: Q8NDH3_C189
  MOD_RES (7)..(7): May or may not be conjugated to a chemical probe
RIVDTPCNEMNTDTFLEEINKV

SEQ ID NO: 7411 - protein, 10 aa, Homo sapiens
  Table 4 sequence identifier: P49023_C290
  MOD_RES (2)..(2): May or may not be conjugated to a chemical probe
RCWAAGWPRD

SEQ ID NO: 7412 - protein, 22 aa, Homo sapiens
  Table 4 sequence identifier: Q9Y508_C8
  MOD_RES (3)..(3): May or may not be conjugated to a chemical probe
RDCGGAAQLAGPAAEADPLGRF

SEQ ID NO: 7413 - protein, 17 aa, Homo sapiens
  Table 4 sequence identifier: P13667_C555
  MOD_RES (12)..(12): May or may not be conjugated to a chemical probe
KDVLIEFYAPWCGHCKQ

SEQ ID NO: 7414 - protein, 17 aa, Homo sapiens
  Table 4 sequence identifier: P30101_C406
  MOD_RES (12)..(12): May or may not be conjugated to a chemical probe
KDVLIEFYAPWCGHCKN

SEQ ID NO: 7415 - protein, 13 aa, Homo sapiens
  Table 4 sequence identifier: P15153_C6
  MOD_RES (2)..(2): May or may not be conjugated to a chemical probe
KCVVVGDGAVGKT

SEQ ID NO: 7416 - protein, 16 aa, Homo sapiens
  Table 4 sequence identifier: Q29RF7_C583
  MOD_RES (14)..(14): May or may not be conjugated to a chemical probe
RSQLELLISPTCSCKQ

SEQ ID NO: 7417 - protein, 38 aa, Homo sapiens; identical to SEQ ID NO: 4404
  Table 4 sequence identifier: Q00839_C408
  MOD_RES (22)..(22): May or may not be conjugated to a chemical probe

SEQ ID NO: 7418 - protein, 17 aa, Homo sapiens
  Table 4 sequence identifier: P13667_C558
  MOD_RES (15)..(15): May or may not be conjugated to a chemical probe
KDVLIEFYAPWCGHCKQ

SEQ ID NO: 7419 - protein, 33 aa, Homo sapiens
  Table 4 sequence identifier: P30101_C409
  MOD_RES (31)..(31): May or may not be conjugated to a chemical probe
KVVVAENFDEIVNNENKDVLIEFYAPWCGHCKN

SEQ ID NO: 7420 - protein, 9 aa, Homo sapiens
  Table 4 sequence identifier: Q9Y4H4_C160
  MOD_RES (9)..(9): May or may not be conjugated to a chemical probe
RSRPPTHTC

SEQ ID NO: 7421 - protein, 13 aa, Homo sapiens
  Table 4 sequence identifier: P60763_C6
  MOD_RES (2)..(2): May or may not be conjugated to a chemical probe
KCVVVGDGAVGKT

SEQ ID NO: 7422 - protein, 13 aa, Homo sapiens
  Table 4 sequence identifier: P63000_C6
  MOD_RES (2)..(2): May or may not be conjugated to a chemical probe
KCVVVGDGAVGKT

SEQ ID NO: 7423 - protein, 18 aa, Homo sapiens
  Table 4 sequence identifier: O95232_C40
  MOD_RES (5)..(5): May or may not be conjugated to a chemical probe
KYYLCGFCPAELFTNTRS

SEQ ID NO: 7424 - protein, 13 aa, Homo sapiens
  Table 4 sequence identifier: P60953_C6
  MOD_RES (2)..(2): May or may not be conjugated to a chemical probe
KCVVVGDGAVGKT

SEQ ID NO: 7425 - protein, 22 aa, Homo sapiens
  Table 4 sequence identifier: P61158_C34
  MOD_RES (17)..(17): May or may not be conjugated to a chemical probe
KLGYAGNTEPQFIIPSCIAIKE

SEQ ID NO: 7426 - protein, 17 aa, Homo sapiens
  Table 4 sequence identifier: Q9P2A4_C137
  MOD_RES (15)..(15): May or may not be conjugated to a chemical probe
KVIAPENLPPLTPYCRR

SEQ ID NO: 7427 - protein, 34 aa, Homo sapiens; identical to SEQ ID NO: 1752
  Table 4 sequence identifier: P16333_C266
  MOD_RES (23)..(23): May or may not be conjugated to a chemical probe

SEQ ID NO: 7428 - protein, 15 aa, Homo sapiens
  Table 4 sequence identifier: P49591_C438
  MOD_RES (4)..(4): May or may not be conjugated to a chemical probe
RTICAILENYQTEKG

SEQ ID NO: 7429 - protein, 22 aa, Homo sapiens
  Table 4 sequence identifier: Q9BQC3_C251
  MOD_RES (16)..(16): May or may not be conjugated to a chemical probe
RLLLGWAPGQPFSSCCPDTGKT

SEQ ID NO: 7430 - protein, 16 aa, Homo sapiens
  Table 4 sequence identifier: Q99439_C61
  MOD_RES (10)..(10): May or may not be conjugated to a chemical probe
KGLKDGTILCTLMNKL

SEQ ID NO: 7431 - protein, 13 aa, Homo sapiens
  Table 4 sequence identifier: Q07020_C134
  MOD_RES (3)..(3): May or may not be conjugated to a chemical probe
KGCGTVLLSGPRK

SEQ ID NO: 7432 - protein, 13 aa, Homo sapiens
  Table 4 sequence identifier: P57772_C442
  MOD_RES (11)..(11): May or may not be conjugated to a chemical probe
RLDADIHTNTCRL

SEQ ID NO: 7433 - protein, 20 aa, Homo sapiens
  Table 4 sequence identifier: Q92797_C848
  MOD_RES (17)..(17): May or may not be conjugated to a chemical probe
RGMGMNSPELLLLVENCPKG

SEQ ID NO: 7434 - protein, 19 aa, Homo sapiens
  Table 4 sequence identifier: Q8WUM4_C250
  MOD_RES (3)..(3): May or may not be conjugated to a chemical probe
KHCIMQANAEYHQSILAKQ

SEQ ID NO: 7435 - protein, 20 aa, Homo sapiens
  Table 4 sequence identifier: P04075_C73
  MOD_RES (5)..(5): May or may not be conjugated to a chemical probe
RVNPCIGGVILFHETLYQKA

SEQ ID NO: 7436 - protein, 23 aa, Homo sapiens
  Table 4 sequence identifier: P31146_C51
  MOD_RES (7)..(7): May or may not be conjugated to a chemical probe
KFVALICEASGGGAFLVLPLGKT

SEQ ID NO: 7437 - protein, 11 aa, Homo sapiens
  Table 4 sequence identifier: P31146_C24
  MOD_RES (5)..(5): May or may not be conjugated to a chemical probe
KADQCYEDVRV

SEQ ID NO: 7438 - protein, 32 aa, Homo sapiens
  Table 4 sequence identifier: Q9NXE8_C107
  MOD_RES (5)..(5): May or may not be conjugated to a chemical probe
KEAGCSSETGLLPGSIFAPSGANSLLDMASKI

SEQ ID NO: 7439 - protein, 17 aa, Homo sapiens
  Table 4 sequence identifier: Q01813_C360
  MOD_RES (7)..(7): May or may not be conjugated to a chemical probe
RLPLMECVQMTQDVQKA

SEQ ID NO: 7440 - protein, 12 aa, Homo sapiens
  Table 4 sequence identifier: Q92878_C1302
  MOD_RES (2)..(2): May or may not be conjugated to a chemical probe
KCSVSSLGFNVH

SEQ ID NO: 7441 - protein, 10 aa, Homo sapiens
  Table 4 sequence identifier: P62241_C174
  MOD_RES (5)..(5): May or may not be conjugated to a chemical probe
KLLACIASRP

SEQ ID NO: 7442 - protein, 22 aa, Homo sapiens
  Table 4 sequence identifier: Q9BQC3_C250
  MOD_RES (15)..(15): May or may not be conjugated to a chemical probe
RLLLGWAPGQPFSSCCPDTGKT

SEQ ID NO: 7443 - protein, 19 aa, Homo sapiens
  Table 4 sequence identifier: Q14166_C612
  MOD_RES (16)..(16): May or may not be conjugated to a chemical probe
RVMQPQILEVNFNPDCERA

SEQ ID NO: 7444 - protein, 17 aa, Homo sapiens
  Table 4 sequence identifier: P62241_C72
  MOD_RES (14)..(14): May or may not be conjugated to a chemical probe
RLDVGNFSWGSECCTRK

SEQ ID NO: 7445 - protein, 12 aa, Homo sapiens
  Table 4 sequence identifier: P28062_C160
  MOD_RES (8)..(8): May or may not be conjugated to a chemical probe
KLLSNMMCQYRG

SEQ ID NO: 7446 - protein, 18 aa, Homo sapiens
  Table 4 sequence identifier: P51649_C340
  MOD_RES (7)..(7): May or may not be conjugated to a chemical probe
RNTGQTCVCSNQFLVQRG

SEQ ID NO: 7447 - protein, 26 aa, Homo sapiens
  Table 4 sequence identifier: Q8WYJ6_C99
  MOD_RES (16)..(16): May or may not be conjugated to a chemical probe
KLTLVDTPGFGDSVDCSDCWLPVVKF

SEQ ID NO: 7448 - protein, 26 aa, Homo sapiens
  Table 4 sequence identifier: Q8WYJ6_C102
  MOD_RES (19)..(19): May or may not be conjugated to a chemical probe
KLTLVDTPGFGDSVDCSDCWLPVVKF

SEQ ID NO: 7449 - protein, 13 aa, Homo sapiens
  Table 4 sequence identifier: Q15027_C64
  MOD_RES (8)..(8): May or may not be conjugated to a chemical probe
RAFVVGICDLARL

SEQ ID NO: 7450 - protein, 13 aa, Homo sapiens
  Table 4 sequence identifier: Q15366_C54
  MOD_RES (9)..(9): May or may not be conjugated to a chemical probe
RINISEGNCPERI

SEQ ID NO: 7451 - protein, 13 aa, Homo sapiens
  Table 4 sequence identifier: Q15365_C54
  MOD_RES (9)..(9): May or may not be conjugated to a chemical probe
RINISEGNCPERI

SEQ ID NO: 7452 - protein, 20 aa, Homo sapiens
  Table 4 sequence identifier: P35236_C204
  MOD_RES (2)..(2): May or may not be conjugated to a chemical probe
KCVHYWPTEEETYGPFQIRI

SEQ ID NO: 7453 - protein, 16 aa, Homo sapiens
  Table 4 sequence identifier: P47756_C147
  MOD_RES (3)..(3): May or may not be conjugated to a chemical probe
KGCWDSIHVVEVQEKS

SEQ ID NO: 7454 - protein, 14 aa, Homo sapiens
  Table 4 sequence identifier: A6NHR9_C444
  MOD_RES (9)..(9): May or may not be conjugated to a chemical probe
RETYPDDPCFPSKL

SEQ ID NO: 7455 - protein, 27 aa, Homo sapiens
  Table 4 sequence identifier: Q5TDH0_C361
  MOD_RES (24)..(24): May or may not be conjugated to a chemical probe
KNVLVIGTTGSQTTFLPEGELPECARL

SEQ ID NO: 7456 - protein, 29 aa, Homo sapiens
  Table 4 sequence identifier: P62266_C90
  MOD_RES (11)..(11): May or may not be conjugated to a chemical probe
KITAFVPNDGCLNFIEENDEVLVAGFGRK

SEQ ID NO: 7457 - protein, 12 aa, Homo sapiens
  Table 4 sequence identifier: P29590_C204
  MOD_RES (10)..(10): May or may not be conjugated to a chemical probe
RTPTLTSIYCRG

SEQ ID NO: 7458 - protein, 27 aa, Homo sapiens
  Table 4 sequence identifier: P42226_C228
  MOD_RES (2)..(2): May or may not be conjugated to a chemical probe
RCESLVDIYSQLQQEVGAAGGELEPKT

SEQ ID NO: 7459 - protein, 31 aa, Homo sapiens
  Table 4 sequence identifier: Q9H1E5_C326
  MOD_RES (18)..(18): May or may not be conjugated to a chemical probe
REEVEPEEAEEGISEQPCPADTEVVEDSLRQ

SEQ ID NO: 7460 - protein, 17 aa, Homo sapiens
  Table 4 sequence identifier: P62241_C71
  MOD_RES (13)..(13): May or may not be conjugated to a chemical probe
RLDVGNFSWGSECCTRK

SEQ ID NO: 7461 - protein, 17 aa, Homo sapiens
  Table 4 sequence identifier: Q9UBW5_C205
  MOD_RES (4)..(4): May or may not be conjugated to a chemical probe
RIGCYVTIFQNISNLRD

SEQ ID NO: 7462 - protein, 13 aa, Homo sapiens
  Table 4 sequence identifier: P41214_C489
  MOD_RES (3)..(3): May or may not be conjugated to a chemical probe
RICPIDITLAQRA

SEQ ID NO: 7463 - protein, 27 aa, Homo sapiens
  Table 4 sequence identifier: Q96I99_C255
  MOD_RES (22)..(22): May or may not be conjugated to a chemical probe
KIDATQVEVNPFGETPEGQVVCFDAKI

SEQ ID NO: 7464 - protein, 10 aa, Homo sapiens
  Table 4 sequence identifier: P63208_C160
  MOD_RES (7)..(7): May or may not be conjugated to a chemical probe
RKENQWCEEK

SEQ ID NO: 7465 - protein, 13 aa, Homo sapiens
  Table 4 sequence identifier: P61163_C34
  MOD_RES (3)..(3): May or may not be conjugated to a chemical probe
KYCFPNYVGRPKH

SEQ ID NO: 7466 - protein, 13 aa, Homo sapiens
  Table 4 sequence identifier: P42025_C34
  MOD_RES (3)..(3): May or may not be conjugated to a chemical probe
KYCFPNYVGRPKH

SEQ ID NO: 7467 - protein, 22 aa, Homo sapiens
  Table 4 sequence identifier: O15381_C626
  MOD_RES (19)..(19): May or may not be conjugated to a chemical probe
KALGLVTPAGVLLAGPPGCGKT

SEQ ID NO: 7468 - protein, 23 aa, Homo sapiens
  Table 4 sequence identifier: Q9NTX5_C133
  MOD_RES (13)..(13): May or may not be conjugated to a chemical probe
KSLGTPEDGMAVCMFMQNTLTRF

SEQ ID NO: 7469 - protein, 13 aa, Homo sapiens
  Table 4 sequence identifier: O43390_C292
  MOD_RES (4)..(4): May or may not be conjugated to a chemical probe
RGFCFLEYEDHKS

SEQ ID NO: 7470 - protein, 13 aa, Homo sapiens
  Table 4 sequence identifier: O60506_C289
  MOD_RES (4)..(4): May or may not be conjugated to a chemical probe
RGFCFLEYEDHKS

SEQ ID NO: 7471 - protein, 25 aa, Homo sapiens
  Table 4 sequence identifier: Q2M2I8_C156
  MOD_RES (16)..(16): May or may not be conjugated to a chemical probe
RLQTGFTENEVLQIFCDTCEAVARL

SEQ ID NO: 7472 - protein, 32 aa, Homo sapiens; identical to SEQ ID NO: 5651
  Table 4 sequence identifier: P62917_C115
  MOD_RES (23)..(23): May or may not be conjugated to a chemical probe

SEQ ID NO: 7473 - protein, 22 aa, Homo sapiens
  Table 4 sequence identifier: O60610_C314
  MOD_RES (4)..(4): May or may not be conjugated to a chemical probe
KVGCLQLINALITPAEELDFRV

SEQ ID NO: 7474 - protein, 27 aa, Homo sapiens
  Table 4 sequence identifier: P12081_C455
  MOD_RES (9)..(9): May or may not be conjugated to a chemical probe
KLLNQLQYCEEAGIPLVAIIGEQELKD

SEQ ID NO: 7475 - protein, 32 aa, Homo sapiens; identical to SEQ ID NO: 5651
  Table 4 sequence identifier: P62917_C114
  MOD_RES (22)..(22): May or may not be conjugated to a chemical probe

SEQ ID NO: 7476 - protein, 10 aa, Homo sapiens
  Table 4 sequence identifier: P23528_C147
  MOD_RES (4)..(4): May or may not be conjugated to a chemical probe
KDRCTLAEKL

SEQ ID NO: 7477 - protein, 21 aa, Homo sapiens
  Table 4 sequence identifier: P49189_C288
  MOD_RES (15)..(15): May or may not be conjugated to a chemical probe
KGALMANFLTQGQVCCNGTRV

SEQ ID NO: 7478 - protein, 21 aa, Homo sapiens
  Table 4 sequence identifier: P49189_C289
  MOD_RES (16)..(16): May or may not be conjugated to a chemical probe
KGALMANFLTQGQVCCNGTRV

SEQ ID NO: 7479 - protein, 28 aa, Homo sapiens
  Table 4 sequence identifier: Q8N0W3_C582
  MOD_RES (4)..(4): May or may not be conjugated to a chemical probe
REGCPGPLLATLDQVAAGAGDPGVAARA

SEQ ID NO: 7480 - protein, 16 aa, Homo sapiens
  Table 4 sequence identifier: Q14137_C404
  MOD_RES (9)..(9): May or may not be conjugated to a chemical probe
RDLQPFPTCQALVYRG

SEQ ID NO: 7481 - protein, 18 aa, Homo sapiens
  Table 4 sequence identifier: Q9Y4K1_C1404
  MOD_RES (9)..(9): May or may not be conjugated to a chemical probe
KISSVQPICLDSFTGPRR

SEQ ID NO: 7482 - protein, 21 aa, Homo sapiens
  Table 4 sequence identifier: P19367_C813
  MOD_RES (13)..(13): May or may not be conjugated to a chemical probe
RAILQQLGLNSTCDDSILVKT

SEQ ID NO: 7483 - protein, 22 aa, Homo sapiens
  Table 4 sequence identifier: P60174_C79
  MOD_RES (10)..(10): May or may not be conjugated to a chemical probe
KVPADTEVVCAPPTAYIDFARQ

SEQ ID NO: 7484 - protein, 9 aa, Homo sapiens
  Table 4 sequence identifier: Q9H307_C249
  MOD_RES (3)..(3): May or may not be conjugated to a chemical probe
RMCPATQKL

SEQ ID NO: 7485 - protein, 20 aa, Homo sapiens
  Table 4 sequence identifier: Q9UKA8_C239
  MOD_RES (18)..(18): May or may not be conjugated to a chemical probe
RRPDPPTAALNEPQTFDCAL

SEQ ID NO: 7486 - protein, 23 aa, Homo sapiens
  Table 4 sequence identifier: O00160_C101
  MOD_RES (7)..(7): May or may not be conjugated to a chemical probe
RNMLIDCENQCVIISGESGAGKT

SEQ ID NO: 7487 - protein, 18 aa, Homo sapiens
  Table 4 sequence identifier: P07355_C133
  MOD_RES (15)..(15): May or may not be conjugated to a chemical probe
KGLGTDEDSLIEIICSRT

SEQ ID NO: 7488 - protein, 11 aa, Homo sapiens
  Table 4 sequence identifier: P07814_C1148
  MOD_RES (6)..(6): May or may not be conjugated to a chemical probe
KLNQWCNVVRW

SEQ ID NO: 7489 - protein, 22 aa, Homo sapiens
  Table 4 sequence identifier: P52907_C157
  MOD_RES (12)..(12): May or may not be conjugated to a chemical probe
KTIDGQQTIIACIESHQFQPKN

SEQ ID NO: 7490 - protein, 26 aa, Homo sapiens
  Table 4 sequence identifier: P62837_C111
  MOD_RES (11)..(11): May or may not be conjugated to a chemical probe
KVLLSICSLLCDPNPDDPLVPEIARI

SEQ ID NO: 7491 - protein, 26 aa, Homo sapiens
  Table 4 sequence identifier: P61077_C111
  MOD_RES (11)..(11): May or may not be conjugated to a chemical probe
KVLLSICSLLCDPNPDDPLVPEIARI

SEQ ID NO: 7492 - protein, 32 aa, Homo sapiens
  Table 4 sequence identifier: Q8NE71_C365
  MOD_RES (14)..(14): May or may not be conjugated to a chemical probe
RALSIPPNIDVLLCEQEVVADETPAVQAVLRA

SEQ ID NO: 7493 - protein, 17 aa, Homo sapiens
  Table 4 sequence identifier: Q8NBU5_C359
  MOD_RES (15)..(15): May or may not be conjugated to a chemical probe
KSKDAAFQNVLTHVCLD

SEQ ID NO: 7494 - protein, 10 aa, Homo sapiens
  Table 4 sequence identifier: P55265_C630
  MOD_RES (6)..(6): May or may not be conjugated to a chemical probe
KLGNSCEFRL

SEQ ID NO: 7495 - protein, 14 aa, Homo sapiens
  Table 4 sequence identifier: Q9Y3Z3_C51
  MOD_RES (9)..(9): May or may not be conjugated to a chemical probe
KTWGPEQVCSFLRR

SEQ ID NO: 7496 - protein, 11 aa, Homo sapiens
  Table 4 sequence identifier: P29728_C668
  MOD_RES (8)..(8): May or may not be conjugated to a chemical probe
KEWLSSPCFKD

SEQ ID NO: 7497 - protein, 35 aa, Homo sapiens; identical to SEQ ID NO: 4590
  Table 4 sequence identifier: O43823_C85
  MOD_RES (24)..(24): May or may not be conjugated to a chemical probe

SEQ ID NO: 7498 - protein, 10 aa, Homo sapiens
  Table 4 sequence identifier: P51610_C135
  MOD_RES (7)..(7): May or may not be conjugated to a chemical probe
KNGPPPCPRL

SEQ ID NO: 7499 - protein, 14 aa, Homo sapiens
  Table 4 sequence identifier: P20592_C100
  MOD_RES (5)..(5): May or may not be conjugated to a chemical probe
KVRPCIDLIDSLRA

SEQ ID NO: 7500 - protein, 38 aa, Homo sapiens
  Table 4 sequence identifier: Q96N96_C124
  MOD_RES (32)..(32): May or may not be conjugated to a chemical probe
RASNVSSDGGTEPSALVDDNGSEEDFSYEDLCQASPRY

SEQ ID NO: 7501 - protein, 27 aa, Homo sapiens
  Table 4 sequence identifier: Q01826_C209
  MOD_RES (3)..(3): May or may not be conjugated to a chemical probe
KECPLSQSMISSIVNSTYYANVSAAKC

SEQ ID NO: 7502 - protein, 9 aa, Homo sapiens
  Table 4 sequence identifier: I3L1I5_C86
  MOD_RES (3)..(3): May or may not be conjugated to a chemical probe
RSCSESWRR

SEQ ID NO: 7503 - protein, 26 aa, Homo sapiens
  Table 4 sequence identifier: P62837_C107
  MOD_RES (7)..(7): May or may not be conjugated to a chemical probe
KVLLSICSLLCDPNPDDPLVPEIARI

SEQ ID NO: 7504 - protein, 26 aa, Homo sapiens
  Table 4 sequence identifier: P61077_C107
  MOD_RES (7)..(7): May or may not be conjugated to a chemical probe
KVLLSICSLLCDPNPDDPLVPEIARI

SEQ ID NO: 7505 - protein, 14 aa, Homo sapiens
  Table 4 sequence identifier: P20591_C52
  MOD_RES (5)..(5): May or may not be conjugated to a chemical probe
KVRPCIDLIDSLRA

SEQ ID NO: 7506 - protein, 22 aa, Homo sapiens
  Table 4 sequence identifier: Q9Y490_C1023
  MOD_RES (19)..(19): May or may not be conjugated to a chemical probe
KASVPTIQDQASAMQLSQCAKN

SEQ ID NO: 7507 - protein, 30 aa, Homo sapiens
  Table 4 sequence identifier: Q99973_C1468
  MOD_RES (23)..(23): May or may not be conjugated to a chemical probe
KSWEEAVAAGNSGDPYPMGPFACLVQSLRS

SEQ ID NO: 7508 - protein, 13 aa, Homo sapiens
  Table 4 sequence identifier: Q8IY67_C297
  MOD_RES (5)..(5): May or may not be conjugated to a chemical probe
RVSFCAPGPPGRS

SEQ ID NO: 7509 - protein, 18 aa, Homo sapiens
  Table 4 sequence identifier: Q8WUM4_C512
  MOD_RES (12)..(12): May or may not be conjugated to a chemical probe
KAVQADGQVKECYQSHRD

SEQ ID NO: 7510 - protein, 9 aa, Homo sapiens
  Table 4 sequence identifier: Q14141_C14
  MOD_RES (7)..(7): May or may not be conjugated to a chemical probe
RQVGEGCRT

SEQ ID NO: 7511 - protein, 19 aa, Homo sapiens
  Table 4 sequence identifier: O15213_C172
  MOD_RES (3)..(3): May or may not be conjugated to a chemical probe
KICQADIVEAVDIASAAKH

SEQ ID NO: 7512 - protein, 14 aa, Homo sapiens
  Table 4 sequence identifier: B0I1T2_C143
  MOD_RES (4)..(4): May or may not be conjugated to a chemical probe
KSTCVLEAFGNART

SEQ ID NO: 7513 - protein, 13 aa, Homo sapiens
  Table 4 sequence identifier: P14868_C349
  MOD_RES (5)..(5): May or may not be conjugated to a chemical probe
RLEYCEALAMLRE

SEQ ID NO: 7514 - protein, 27 aa, Homo sapiens
  Table 4 sequence identifier: P40227_C406
  MOD_RES (8)..(8): May or may not be conjugated to a chemical probe
KNAIDDGCVVPGAGAVEVAMAEALIKH

SEQ ID NO: 7515 - protein, 20 aa, Homo sapiens
  Table 4 sequence identifier: Q29RF7_C327
  MOD_RES (15)..(15): May or may not be conjugated to a chemical probe
KDSDLATQNRPLWQCFLGRF

SEQ ID NO: 7516 - protein, 22 aa, Homo sapiens
  Table 4 sequence identifier: Q8NF50_C170
  MOD_RES (11)..(11): May or may not be conjugated to a chemical probe
KQTFESETLECSEPAAQAGPRH

SEQ ID NO: 7517 - protein, 33 aa, Homo sapiens; identical to SEQ ID NO: 3080
  Table 4 sequence identifier: Q14683_C1115
  MOD_RES (26)..(26): May or may not be conjugated to a chemical probe

SEQ ID NO: 7518 - protein, 40 aa, Homo sapiens; identical to SEQ ID NO: 3737
  Table 4 sequence identifier: O14773_C522
  MOD_RES (3)..(3): May or may not be conjugated to a chemical probe

SEQ ID NO: 7519 - protein, 40 aa, Homo sapiens; identical to SEQ ID NO: 3737
  Table 4 sequence identifier: O14773_C526
  MOD_RES (7)..(7): May or may not be conjugated to a chemical probe

SEQ ID NO: 7520 - protein, 40 aa, Homo sapiens; identical to SEQ ID NO: 3737
  Table 4 sequence identifier: O14773_C537
  MOD_RES (18)..(18): May or may not be conjugated to a chemical probe

SEQ ID NO: 7521 - protein, 20 aa, Homo sapiens
  Table 4 sequence identifier: Q9NTI5_C317
  MOD_RES (15)..(15): May or may not be conjugated to a chemical probe
KDSELASQNKPLWQCYLGRF

SEQ ID NO: 7522 - protein, 49 aa, Homo sapiens
  Table 4 sequence identifier: Q9NVP1_C183
  MOD_RES (39)..(39): May or may not be conjugated to a chemical probe
KETENNVEKPDNDEDESEVPSLPLGLTGAFEDTSFASLCNLVNENTLKA

SEQ ID NO: 7523 - protein, 12 aa, Homo sapiens
  Table 4 sequence identifier: Q9Y490_C1506
  MOD_RES (7)..(7): May or may not be conjugated to a chemical probe
KHTSALCNSCRL

SEQ ID NO: 7524 - protein, 26 aa, Homo sapiens
  Table 4 sequence identifier: P13796_C164
  MOD_RES (24)..(24): May or may not be conjugated to a chemical probe
RHVIPMNPNTNDLFNAVGDGIVLCKM

SEQ ID NO: 7525 - protein, 12 aa, Homo sapiens
  Table 4 sequence identifier: Q5EBM0_C287
  MOD_RES (6)..(6): May or may not be conjugated to a chemical probe
KSPPSCIGQWRK

SEQ ID NO: 7526 - protein, 28 aa, Homo sapiens
  Table 4 sequence identifier: Q08AF3_C875
  MOD_RES (23)..(23): May or may not be conjugated to a chemical probe
RNIVFGINPGVAPPAGAYNLLLCLASRA

SEQ ID NO: 7527 - protein, 12 aa, Homo sapiens
  Table 4 sequence identifier: Q9NUV9_C220
  MOD_RES (7)..(7): May or may not be conjugated to a chemical probe
RENKEGCYTNRM

SEQ ID NO: 7528 - protein, 23 aa, Homo sapiens
  Table 4 sequence identifier: P08238_C589
  MOD_RES (7)..(7): May or may not be conjugated to a chemical probe
RLVSSPCCIVTSTYGWTANMERI

SEQ ID NO: 7529 - protein, 23 aa, Homo sapiens
  Table 4 sequence identifier: P08238_C590
  MOD_RES (8)..(8): May or may not be conjugated to a chemical probe
RLVSSPCCIVTSTYGWTANMERI

SEQ ID NO: 7530 - protein, 11 aa, Homo sapiens
  Table 4 sequence identifier: P60866_C70
  MOD_RES (5)..(5): May or may not be conjugated to a chemical probe
RKTPCGEGSKT

SEQ ID NO: 7531 - protein, 23 aa, Homo sapiens
  Table 4 sequence identifier: Q08J23_C673
  MOD_RES (14)..(14): May or may not be conjugated to a chemical probe
KYEPDSANPDALQCPIVLCGWRG

SEQ ID NO: 7532 - protein, 20 aa, Homo sapiens
  Table 4 sequence identifier: Q9H4E7_C253
  MOD_RES (18)..(18): May or may not be conjugated to a chemical probe
RWFQLQPSCLCYFGSEECKE

SEQ ID NO: 7533 - protein, 25 aa, Homo sapiens
  Table 4 sequence identifier: Q15365_C194
  MOD_RES (18)..(18): May or may not be conjugated to a chemical probe
RVMTIPYQPMPASSPVICAGGQDRC

SEQ ID NO: 7534 - protein, 14 aa, Homo sapiens
  Table 4 sequence identifier: P30041_C47
  MOD_RES (7)..(7): May or may not be conjugated to a chemical probe
RDFTPVCTTELGRA

SEQ ID NO: 7535 - protein, 16 aa, Homo sapiens
  Table 4 sequence identifier: P78371_C395
  MOD_RES (8)..(8): May or may not be conjugated to a chemical probe
RSLHDALCVLAQTVKD

SEQ ID NO: 7536 - protein, 15 aa, Homo sapiens
  Table 4 sequence identifier: P46782_C155
  MOD_RES (10)..(10): May or may not be conjugated to a chemical probe
RVNQAIWLLCTGARE

SEQ ID NO: 7537 - protein, 17 aa, Homo sapiens
  Table 4 sequence identifier: Q96GM5_C492
  MOD_RES (15)..(15): May or may not be conjugated to a chemical probe
RAEFYFQPWAQEAVCRY

SEQ ID NO: 7538 - protein, 11 aa, Homo sapiens
  Table 4 sequence identifier: P10599_C73
  MOD_RES (2)..(2): May or may not be conjugated to a chemical probe
KCMPTFQFFKK

SEQ ID NO: 7539 - protein, 20 aa, Homo sapiens
  Table 4 sequence identifier: Q14258_C70
  MOD_RES (6)..(6): May or may not be conjugated to a chemical probe
KNTVLCNVVEQFLQADLARE

SEQ ID NO: 7540 - protein, 19 aa, Homo sapiens
  Table 4 sequence identifier: Q96RN5_C618
  MOD_RES (6)..(6): May or may not be conjugated to a chemical probe
KQQYLCQPLLDAVLANIRS

SEQ ID NO: 7541 - protein, 18 aa, Homo sapiens
  Table 4 sequence identifier: P45973_C133
  MOD_RES (9)..(9): May or may not be conjugated to a chemical probe
KIIGATDSCGDLMFLMKW

SEQ ID NO: 7542 - protein, 22 aa, Homo sapiens
  Table 4 sequence identifier: Q9UHD8_C248
  MOD_RES (12)..(12): May or may not be conjugated to a chemical probe
RSQEATEAAPSCVGDMADTPRD

SEQ ID NO: 7543 - protein, 9 aa, Homo sapiens
  Table 4 sequence identifier: P39023_C336
  MOD_RES (3)..(3): May or may not be conjugated to a chemical probe
KGCVVGTKK

SEQ ID NO: 7544 - protein, 16 aa, Homo sapiens
  Table 4 sequence identifier: O14980_C164
  MOD_RES (7)..(7): May or may not be conjugated to a chemical probe
RTSESLCQNNMVILKL

SEQ ID NO: 7545 - protein, 23 aa, Homo sapiens
  Table 4 sequence identifier: Q08J23_C678
  MOD_RES (19)..(19): May or may not be conjugated to a chemical probe
KYEPDSANPDALQCPIVLCGWRG

SEQ ID NO: 7546 - protein, 9 aa, Homo sapiens
  Table 4 sequence identifier: Q00839_C562
  MOD_RES (5)..(5): May or may not be conjugated to a chemical probe
RAPQCLGKF

SEQ ID NO: 7547 - protein, 34 aa, Homo sapiens; identical to SEQ ID NO: 470
  Table 4 sequence identifier: Q9BVA1_C127
  MOD_RES (6)..(6): May or may not be conjugated to a chemical probe

SEQ ID NO: 7548 - protein, 34 aa, Homo sapiens; identical to SEQ ID NO: 470
  Table 4 sequence identifier: Q9BVA1_C129
  MOD_RES (8)..(8): May or may not be conjugated to a chemical probe

SEQ ID NO: 7549 - protein, 30 aa, Homo sapiens
  Table 4 sequence identifier: P10599_C32
  MOD_RES (25)..(25): May or may not be conjugated to a chemical probe
KTAFQEALDAAGDKLVVVDFSATWCGPCKM

SEQ ID NO: 7550 - protein, 18 aa, Homo sapiens
  Table 4 sequence identifier: Q14289_C677
  MOD_RES (7)..(7): May or may not be conjugated to a chemical probe
RFTELVCSLSDVYQMEKD

SEQ ID NO: 7551 - protein, 20 aa, Homo sapiens
  Table 4 sequence identifier: Q9H4E7_C244
  MOD_RES (9)..(9): May or may not be conjugated to a chemical probe
RWFQLQPSCLCYFGSEECKE

SEQ ID NO: 7552 - protein, 28 aa, Homo sapiens
  Table 4 sequence identifier: P15311_C117
  MOD_RES (11)..(11): May or may not be conjugated to a chemical probe
KEGILSDEIYCPPETAVLLGSYAVQAKF

SEQ ID NO: 7553 - protein, 9 aa, Homo sapiens
  Table 4 sequence identifier: P55060_C387
  MOD_RES (4)..(4): May or may not be conjugated to a chemical probe
RAACDLVRG

SEQ ID NO: 7554 - protein, 14 aa, Homo sapiens
  Table 4 sequence identifier: Q13838_C165
  MOD_RES (3)..(3): May or may not be conjugated to a chemical probe
KNCPHIVVGTPGRI

SEQ ID NO: 7555 - protein, 13 aa, Homo sapiens
  Table 4 sequence identifier: A6NE09_C163
  MOD_RES (9)..(9): May or may not be conjugated to a chemical probe
RYVDIAIPCNNKG

SEQ ID NO: 7556 - protein, 12 aa, Homo sapiens
  Table 4 sequence identifier: Q9BTZ2_C209
  MOD_RES (4)..(4): May or may not be conjugated to a chemical probe
RVNCLAPGLIKT

SEQ ID NO: 7557 - protein, 8 aa, Homo sapiens
  Table 4 sequence identifier: Q8IY21_C517
  MOD_RES (2)..(2): May or may not be conjugated to a chemical probe
RCQFDEKS

SEQ ID NO: 7558 - protein, 13 aa, Homo sapiens
  Table 4 sequence identifier: P04075_C339
  MOD_RES (9)..(9): May or may not be conjugated to a chemical probe
RALANSLACQGKY

SEQ ID NO: 7559 - protein, 27 aa, Homo sapiens
  Table 4 sequence identifier: P13639_C466
  MOD_RES (11)..(11): May or may not be conjugated to a chemical probe
RYVEPIEDVPCGNIVGLVGVDQFLVKT

SEQ ID NO: 7560 - protein, 29 aa, Homo sapiens
  Table 4 sequence identifier: Q99832_C29
  MOD_RES (20)..(20): May or may not be conjugated to a chemical probe
KEGTDSSQGIPQLVSNISACQVIAEAVRT

SEQ ID NO: 7561 - protein, 15 aa, Homo sapiens
  Table 4 sequence identifier: P12814_C332
  MOD_RES (2)..(2): May or may not be conjugated to a chemical probe
KCQLEINFNTLQTKL

SEQ ID NO: 7562 - protein, 15 aa, Homo sapiens
  Table 4 sequence identifier: Q92619_C278
  MOD_RES (2)..(2): May or may not be conjugated to a chemical probe
RCEGGVDAALLYAKN

SEQ ID NO: 7563 - protein, 19 aa, Homo sapiens
  Table 4 sequence identifier: Q13131_C185
  MOD_RES (4)..(4): May or may not be conjugated to a chemical probe
RTSCGSPNYAAPEVISGRL

SEQ ID NO: 7564 - protein, 19 aa, Homo sapiens
  Table 4 sequence identifier: P54646_C174
  MOD_RES (4)..(4): May or may not be conjugated to a chemical probe
RTSCGSPNYAAPEVISGRL

SEQ ID NO: 7565 - protein, 20 aa, Homo sapiens
  Table 4 sequence identifier: Q00610_C926
  MOD_RES (4)..(4): May or may not be conjugated to a chemical probe
RGQCDLELINVCNENSLFKS

SEQ ID NO: 7566 - protein, 20 aa, Homo sapiens
  Table 4 sequence identifier: Q00610_C934
  MOD_RES (12)..(12): May or may not be conjugated to a chemical probe
RGQCDLELINVCNENSLFKS

SEQ ID NO: 7567 - protein, 15 aa, Homo sapiens
  Table 4 sequence identifier: Q99439_C175
  MOD_RES (2)..(2): May or may not be conjugated to a chemical probe
KCASQSGMTAYGTRR

SEQ ID NO: 7568 - protein, 19 aa, Homo sapiens
  Table 4 sequence identifier: B0I1T2_C965
  MOD_RES (13)..(13): May or may not be conjugated to a chemical probe
RVGELVGVLAAHCQGEGRT

SEQ ID NO: 7569 - protein, 16 aa, Homo sapiens
  Table 4 sequence identifier: Q02252_C317
  MOD_RES (2)..(2): May or may not be conjugated to a chemical probe
RCMALSTAVLVGEAKK

SEQ ID NO: 7570 - protein, 22 aa, Homo sapiens
  Table 4 sequence identifier: P12955_C467
  MOD_RES (18)..(18): May or may not be conjugated to a chemical probe
RIEEDVVVTDSGIELLTCVPRT

SEQ ID NO: 7571 - protein, 21 aa, Homo sapiens
  Table 4 sequence identifier: P08238_C366
  MOD_RES (8)..(8): May or may not be conjugated to a chemical probe
RVFIMDSCDELIPEYLNFIRG

SEQ ID NO: 7572 - protein, 20 aa, Homo sapiens
  Table 4 sequence identifier: P13639_C369
  MOD_RES (2)..(2): May or may not be conjugated to a chemical probe
RCELLYEGPPDDEAAMGIKS

SEQ ID NO: 7573 - protein, 17 aa, Homo sapiens
  Table 4 sequence identifier: P41240_C31
  MOD_RES (15)..(15): May or may not be conjugated to a chemical probe
KYNFHGTAEQDLPFCKG

SEQ ID NO: 7574 - protein, 40 aa, Homo sapiens; identical to SEQ ID NO: 1496
  Table 4 sequence identifier: P13639_C812
  MOD_RES (12)..(12): May or may not be conjugated to a chemical probe

SEQ ID NO: 7575 - protein, 20 aa, Homo sapiens
  Table 4 sequence identifier: P22736_C551
  MOD_RES (16)..(16): May or may not be conjugated to a chemical probe
KEHVAAVAGEPQPASCLSRL

SEQ ID NO: 7576 - protein, 19 aa, Homo sapiens
  Table 4 sequence identifier: Q8WVV9_C84
  MOD_RES (4)..(4): May or may not be conjugated to a chemical probe
RGLCESVVEADLVEALEKF

SEQ ID NO: 7577 - protein, 15 aa, Homo sapiens
  Table 4 sequence identifier: O43707_C351
  MOD_RES (2)..(2): May or may not be conjugated to a chemical probe
KCQLEINFNTLQTKL

SEQ ID NO: 7578 - protein, 16 aa, Homo sapiens
  Table 4 sequence identifier: Q9H4B7_C340
  MOD_RES (5)..(5): May or may not be conjugated to a chemical probe
RNSSCFVEWIPNNVKV

SEQ ID NO: 7579 - protein, 13 aa, Homo sapiens
  Table 4 sequence identifier: O15067_C270
  MOD_RES (3)..(3): May or may not be conjugated to a chemical probe
KFCDNSSAIQGKE

SEQ ID NO: 7580 - protein, 29 aa, Homo sapiens
  Table 4 sequence identifier: Q13045_C232
  MOD_RES (23)..(23): May or may not be conjugated to a chemical probe
RTQSNLPTSLEGLSNLADVDLSCNDLTRV

SEQ ID NO: 7581 - protein, 13 aa, Homo sapiens
  Table 4 sequence identifier: Q13057_C144
  MOD_RES (10)..(10): May or may not be conjugated to a chemical probe
RYATSCYSCCPRL

SEQ ID NO: 7582 - protein, 25 aa, Homo sapiens
  Table 4 sequence identifier: P43243_C230
  MOD_RES (2)..(2): May or may not be conjugated to a chemical probe
RCRDDSFFGETSHNYHKFDSEYERM

SEQ ID NO: 7583 - protein, 18 aa, Homo sapiens
  Table 4 sequence identifier: A5YKK6_C624
  MOD_RES (2)..(2): May or may not be conjugated to a chemical probe
RCPSILGGLAPEKDQPKS

SEQ ID NO: 7584 - protein, 22 aa, Homo sapiens
  Table 4 sequence identifier: Q9Y6D5_C76
  MOD_RES (18)..(18): May or may not be conjugated to a chemical probe
KANFIEADKYFLPFELACQSKS

SEQ ID NO: 7585 - protein, 12 aa, Homo sapiens
  Table 4 sequence identifier: P49915_C489
  MOD_RES (3)..(3): May or may not be conjugated to a chemical probe
KACTTEEDQEKL

SEQ ID NO: 7586 - protein, 8 aa, Homo sapiens
  Table 4 sequence identifier: Q96BN8_C347
  MOD_RES (3)..(3): May or may not be conjugated to a chemical probe
RVCEETSL

SEQ ID NO: 7587 - protein, 26 aa, Homo sapiens
  Table 4 sequence identifier: P43403_C78
  MOD_RES (4)..(4): May or may not be conjugated to a chemical probe
KAHCGPAELCEFYSRDPDGLPCNLRK

SEQ ID NO: 7588 - protein, 23 aa, Homo sapiens
  Table 4 sequence identifier: Q9Y3D0_C158
  MOD_RES (18)..(18): May or may not be conjugated to a chemical probe
RVAAALENTHLLEVVNQCLSARS

SEQ ID NO: 7589 - protein, 16 aa, Homo sapiens
  Table 4 sequence identifier: Q03518_C795
  MOD_RES (3)..(3): May or may not be conjugated to a chemical probe
KGCYWAMVQAPADAPE

SEQ ID NO: 7590 - protein, 24 aa, Homo sapiens
  Table 4 sequence identifier: Q86WS5_C64
  MOD_RES (10)..(10): May or may not be conjugated to a chemical probe
REGGAHAEDCGTAPLKDVLQGSRI

SEQ ID NO: 7591 - protein, 24 aa, Homo sapiens
  Table 4 sequence identifier: P50579_C298
  MOD_RES (3)..(3): May or may not be conjugated to a chemical probe
RLCDVGEAIQEVMESYEVEIDGKT

SEQ ID NO: 7592 - protein, 29 aa, Homo sapiens
  Table 4 sequence identifier: Q14019_C52
  MOD_RES (23)..(23): May or may not be conjugated to a chemical probe
KYDGSTIVPGEQGAEYQHFIQQCTDDVRL

SEQ ID NO: 7593 - protein, 19 aa, Homo sapiens
  Table 4 sequence identifier: P34897_C119
  MOD_RES (16)..(16): May or may not be conjugated to a chemical probe
RYYGGAEVVDEIELLCQRR

SEQ ID NO: 7594 - protein, 18 aa, Homo sapiens
  Table 4 sequence identifier: Q86YV9_C695
  MOD_RES (3)..(3): May or may not be conjugated to a chemical probe
RLCPPELAPAELLLLLRT

SEQ ID NO: 7595 - protein, 15 aa, Homo sapiens
  Table 4 sequence identifier: Q96FX7_C209
  MOD_RES (8)..(8): May or may not be conjugated to a chemical probe
RFCSFSPCIEQVQRT

SEQ ID NO: 7596 - protein, 14 aa, Homo sapiens
  Table 4 sequence identifier: P23528_C139
  MOD_RES (8)..(8): May or may not be conjugated to a chemical probe
KHELQANCYEEVKD

SEQ ID NO: 7597 - protein, 13 aa, Homo sapiens
  Table 4 sequence identifier: Q96F15_C238
  MOD_RES (7)..(7): May or may not be conjugated to a chemical probe
RTGAGACQEDYRQ

SEQ ID NO: 7598 - protein, 18 aa, Homo sapiens
  Table 4 sequence identifier: P62888_C92
  MOD_RES (3)..(3): May or may not be conjugated to a chemical probe
RVCTLAIIDPGDSDIIRS

SEQ ID NO: 7599 - protein, 22 aa, Homo sapiens
  Table 4 sequence identifier: Q8N163_C644
  MOD_RES (9)..(9): May or may not be conjugated to a chemical probe
RGEASEDLCEMALDPELLLLRD

SEQ ID NO: 7600 - protein, 30 aa, Homo sapiens
  Table 4 sequence identifier: Q9C0K0_C642
  MOD_RES (17)..(17): May or may not be conjugated to a chemical probe
RAAGGGDAGDDDDAGGCGDAGAGGAVNGRG

SEQ ID NO: 7601 - protein, 18 aa, Homo sapiens
  Table 4 sequence identifier: P53618_C888
  MOD_RES (7)..(7): May or may not be conjugated to a chemical probe
KALSGYCGFMAANLYARS

SEQ ID NO: 7602 - protein, 28 aa, Homo sapiens
  Table 4 sequence identifier: P13639_C751
  MOD_RES (13)..(13): May or may not be conjugated to a chemical probe
RLMEPIYLVEIQCPEQVVGGIYGVLNRK

SEQ ID NO: 7603 - protein, 11 aa, Homo sapiens
  Table 4 sequence identifier: P60763_C178
  MOD_RES (5)..(5): May or may not be conjugated to a chemical probe
RAVLCPPPVKK

SEQ ID NO: 7604 - protein, 11 aa, Homo sapiens
  Table 4 sequence identifier: P63000_C178
  MOD_RES (5)..(5): May or may not be conjugated to a chemical probe
RAVLCPPPVKK

SEQ ID NO: 7605 - protein, 26 aa, Homo sapiens
  Table 4 sequence identifier: P38606_C254
  MOD_RES (23)..(23): May or may not be conjugated to a chemical probe
RVLDALFPCVQGGTTAIPGAFGCGKT

SEQ ID NO: 7606 - protein, 27 aa, Homo sapiens
  Table 4 sequence identifier: Q14683_C987
  MOD_RES (13)..(13): May or may not be conjugated to a chemical probe
REALIEIDYGDLCEDLKDAQAEEEIKQ

SEQ ID NO: 7607 - protein, 12 aa, Homo sapiens
  Table 4 sequence identifier: P23528_C39
  MOD_RES (6)..(6): May or may not be conjugated to a chemical probe
KAVLFCLSEDKK

SEQ ID NO: 7608 - protein, 10 aa, Homo sapiens
  Table 4 sequence identifier: P17987_C147
  MOD_RES (3)..(3): May or may not be conjugated to a chemical probe
RDCLINAAKT

SEQ ID NO: 7609 - protein, 20 aa, Homo sapiens
  Table 4 sequence identifier: P31946_C96
  MOD_RES (10)..(10): May or may not be conjugated to a chemical probe
KIEAELQDICNDVLELLDKY

SEQ ID NO: 7610 - protein, 13 aa, Homo sapiens
  Table 4 sequence identifier: Q63HN8_C1748
  MOD_RES (6)..(6): May or may not be conjugated to a chemical probe
RASVGCGSEAARY

SEQ ID NO: 7611 - protein, 17 aa, Homo sapiens
  Table 4 sequence identifier: P46782_C172
  MOD_RES (6)..(6): May or may not be conjugated to a chemical probe
KTIAECLADELINAAKG

SEQ ID NO: 7612 - protein, 14 aa, Homo sapiens
  Table 4 sequence identifier: O00483_C44
  MOD_RES (10)..(10): May or may not be conjugated to a chemical probe
RLALFNPDVCWDRN

SEQ ID NO: 7613 - protein, 31 aa, Homo sapiens; identical to SEQ ID NO: 64
  Table 4 sequence identifier: P50570_C27
  MOD_RES (13)..(13): May or may not be conjugated to a chemical probe

SEQ ID NO: 7614 - protein, 25 aa, Homo sapiens
  Table 4 sequence identifier: O75427_C179
  MOD_RES (18)..(18): May or may not be conjugated to a chemical probe
RQLDVSSNELQSLPSELCGLSSLRD

SEQ ID NO: 7615 - protein, 23 aa, Homo sapiens
  Table 4 sequence identifier: P22234_C81
  MOD_RES (2)..(2): May or may not be conjugated to a chemical probe
KCGETAFIAPQCEMIPIEWVCRR

SEQ ID NO: 7616 - protein, 13 aa, Homo sapiens
  Table 4 sequence identifier: P34932_C34
  MOD_RES (2)..(2): May or may not be conjugated to a chemical probe
RCTPACISFGPKN

SEQ ID NO: 7617 - protein, 20 aa, Homo sapiens
  Table 4 sequence identifier: H3BQZ7_C452
  MOD_RES (6)..(6): May or may not be conjugated to a chemical probe
KTIEECEVILMVGLPGSGKT

SEQ ID NO: 7618 - protein, 20 aa, Homo sapiens
  Table 4 sequence identifier: Q1KMD3_C452
  MOD_RES (6)..(6): May or may not be conjugated to a chemical probe
KTIEECEVILMVGLPGSGKT

SEQ ID NO: 7619 - protein, 20 aa, Homo sapiens
  Table 4 sequence identifier: P62837_C85
  MOD_RES (14)..(14): May or may not be conjugated to a chemical probe
RIYHPNINSNGSICLDILRS

SEQ ID NO: 7620 - protein, 20 aa, Homo sapiens
  Table 4 sequence identifier: P61077_C85
  MOD_RES (14)..(14): May or may not be conjugated to a chemical probe
RIYHPNINSNGSICLDILRS

SEQ ID NO: 7621 - protein, 43 aa, Homo sapiens; identical to SEQ ID NO: 1174
  Table 4 sequence identifier: P52565_C79
  MOD_RES (22)..(22): May or may not be conjugated to a chemical probe

SEQ ID NO: 7622 - protein, 8 aa, Homo sapiens
  Table 4 sequence identifier: Q9HCD5_C137
  MOD_RES (6)..(6): May or may not be conjugated to a chemical probe
RMDDYCRR

SEQ ID NO: 7623 - protein, 11 aa, Homo sapiens
  Table 4 sequence identifier: O14733_C260
  MOD_RES (3)..(3): May or may not be conjugated to a chemical probe
KLCDFGISGRL

SEQ ID NO: 7624 - protein, 12 aa, Homo sapiens
  Table 4 sequence identifier: Q14203_C791
  MOD_RES (7)..(7): May or may not be conjugated to a chemical probe
RDLETSCSDIRQ

SEQ ID NO: 7625 - protein, 11 aa, Homo sapiens
  Table 4 sequence identifier: Q96JM7_C682
  MOD_RES (6)..(6): May or may not be conjugated to a chemical probe
KSPIPCLPLRW

SEQ ID NO: 7626 - protein, 23 aa, Homo sapiens
  Table 4 sequence identifier: O14773_C365
  MOD_RES (16)..(16): May or may not be conjugated to a chemical probe
RGLTLLFASGDSGAGCWSVSGRH

SEQ ID NO: 7627 - protein, 13 aa, Homo sapiens
  Table 4 sequence identifier: P61158_C408
  MOD_RES (11)..(11): May or may not be conjugated to a chemical probe
KDYEEIGPSICRH

SEQ ID NO: 7628 - protein, 31 aa, Homo sapiens; identical to SEQ ID NO: 2649
  Table 4 sequence identifier: P45974_C532
  MOD_RES (9)..(9): May or may not be conjugated to a chemical probe

SEQ ID NO: 7629 - protein, 32 aa, Homo sapiens; identical to SEQ ID NO: 1242
  Table 4 sequence identifier: P23368_C120
  MOD_RES (23)..(23): May or may not be conjugated to a chemical probe

SEQ ID NO: 7630 - protein, 11 aa, Homo sapiens
  Table 4 sequence identifier: P60903_C62
  MOD_RES (6)..(6): May or may not be conjugated to a chemical probe
KDLDQCRDGKV

SEQ ID NO: 7631 - protein, 14 aa, Homo sapiens
  Table 4 sequence identifier: Q07955_C148
  MOD_RES (7)..(7): May or may not be conjugated to a chemical probe
REAGDVCYADVYRD

SEQ ID NO: 7632 - protein, 10 aa, Homo sapiens
  Table 4 sequence identifier: P10644_C18
  MOD_RES (3)..(3): May or may not be conjugated to a chemical probe
RECELYVQKH

SEQ ID NO: 7633 - protein, 20 aa, Homo sapiens
  Table 4 sequence identifier: P07814_C692
  MOD_RES (18)..(18): May or may not be conjugated to a chemical probe
RGFFICDQPYEPVSPYSCKE

SEQ ID NO: 7634 - protein, 12 aa, Homo sapiens
  Table 4 sequence identifier: O15355_C13
  MOD_RES (2)..(2): May or may not be conjugated to a chemical probe
KCSGDGVGAPRL

SEQ ID NO: 7635 - protein, 11 aa, Homo sapiens
  Table 4 sequence identifier: P08133_C669
  MOD_RES (7)..(7): May or may not be conjugated to a chemical probe
KALLALCGGED

SEQ ID NO: 7636 - protein, 24 aa, Homo sapiens
  Table 4 sequence identifier: P22314_C1039
  MOD_RES (8)..(8): May or may not be conjugated to a chemical probe
RALVLELCCNDESGEDVEVPYVRY

SEQ ID NO: 7637 - protein, 11 aa, Homo sapiens
  Table 4 sequence identifier: Q00839_C594
  MOD_RES (3)..(3): May or may not be conjugated to a chemical probe
KMCLFAGFQRK

SEQ ID NO: 7638 - protein, 24 aa, Homo sapiens
  Table 4 sequence identifier: O14980_C34
  MOD_RES (13)..(13): May or may not be conjugated to a chemical probe
KLDINLLDNVVNCLYHGEGAQQRM

SEQ ID NO: 7639 - protein, 14 aa, Homo sapiens
  Table 4 sequence identifier: O43290_C645
  MOD_RES (10)..(10): May or may not be conjugated to a chemical probe
RGLAAALLLCQNKG

SEQ ID NO: 7640 - protein, 9 aa, Homo sapiens
  Table 4 sequence identifier: Q9Y5Y2_C72
  MOD_RES (6)..(6): May or may not be conjugated to a chemical probe
RAVHQCDRG

SEQ ID NO: 7641 - protein, 39 aa, Homo sapiens; identical to SEQ ID NO: 1564
  Table 4 sequence identifier: Q15365_C201
  MOD_RES (2)..(2): May or may not be conjugated to a chemical probe

SEQ ID NO: 7642 - protein, 20 aa, Homo sapiens
  Table 4 sequence identifier: P30086_C168
  MOD_RES (8)..(8): May or may not be conjugated to a chemical probe
RAPVAGTCYQAEWDDYVPKL

SEQ ID NO: 7643 - protein, 24 aa, Homo sapiens
  Table 4 sequence identifier: P11142_C17
  MOD_RES (15)..(15): May or may not be conjugated to a chemical probe
KGPAVGIDLGTTYSCVGVFQHGKV

SEQ ID NO: 7644 - protein, 18 aa, Homo sapiens
  Table 4 sequence identifier: O60496_C110
  MOD_RES (9)..(9): May or may not be conjugated to a chemical probe
RGDWVQAICLLAFPGQRK

SEQ ID NO: 7645 - protein, 26 aa, Homo sapiens
  Table 4 sequence identifier: P85037_C254
  MOD_RES (20)..(20): May or may not be conjugated to a chemical probe
RSMVSPVPSPTGTISVPNSCPASPRG

SEQ ID NO: 7646 - protein, 20 aa, Homo sapiens
  Table 4 sequence identifier: P54577_C250
  MOD_RES (4)..(4): May or may not be conjugated to a chemical probe
KAFCEPGNVENNGVLSFIKH

SEQ ID NO: 7647 - protein, 16 aa, Homo sapiens
  Table 4 sequence identifier: Q8IX01_C656
  MOD_RES (12)..(12): May or may not be conjugated to a chemical probe
RGADQKPTSADCAVRA

SEQ ID NO: 7648 - protein, 24 aa, Homo sapiens
  Table 4 sequence identifier: P22314_C1040
  MOD_RES (9)..(9): May or may not be conjugated to a chemical probe
RALVLELCCNDESGEDVEVPYVRY

SEQ ID NO: 7649 - protein, 17 aa, Homo sapiens
  Table 4 sequence identifier: Q709C8_C2177
  MOD_RES (10)..(10): May or may not be conjugated to a chemical probe
KNITTVLQPCSLFMEKC

SEQ ID NO: 7650 - protein, 10 aa, Homo sapiens
  Table 4 sequence identifier: Q709C8_C2440
  MOD_RES (6)..(6): May or may not be conjugated to a chemical probe
KVKPNCNLRV

SEQ ID NO: 7651 - protein, 32 aa, Homo sapiens; identical to SEQ ID NO: 2951
  Table 4 sequence identifier: P61158_C189
  MOD_RES (29)..(29): May or may not be conjugated to a chemical probe

SEQ ID NO: 7652 - protein, 13 aa, Homo sapiens
  Table 4 sequence identifier: P0CW22_C35
  MOD_RES (3)..(3): May or may not be conjugated to a chemical probe
RVCEEIAIIPSKK

SEQ ID NO: 7653 - protein, 17 aa, Homo sapiens
  Table 4 sequence identifier: Q6KC79_C1795
  MOD_RES (2)..(2): May or may not be conjugated to a chemical probe
KCLSEVVAVDPSILARL

SEQ ID NO: 7654 - protein, 19 aa, Homo sapiens
  Table 4 sequence identifier: Q15042_C322
  MOD_RES (7)..(7): May or may not be conjugated to a chemical probe
KAENPQCLLGDFVTEFFKI

SEQ ID NO: 7655 - protein, 9 aa, Homo sapiens
  Table 4 sequence identifier: P60709_C285
  MOD_RES (2)..(2): May or may not be conjugated to a chemical probe
KCDVDIRKD

SEQ ID NO: 7656 - protein, 26 aa, Homo sapiens
  Table 4 sequence identifier: P04899_C112
  MOD_RES (8)..(8): May or may not be conjugated to a chemical probe
RQLFALSCTAEEQGVLPDDLSGVIRR

SEQ ID NO: 7657 - protein, 14 aa, Homo sapiens
  Table 4 sequence identifier: P23396_C97
  MOD_RES (4)..(4): May or may not be conjugated to a chemical probe
RGLCAIAQAESLRY

SEQ ID NO: 7658 - protein, 27 aa, Homo sapiens
  Table 4 sequence identifier: P00558_C316
  MOD_RES (20)..(20): May or may not be conjugated to a chemical probe
KTGQATVASGIPAGWMGLDCGPESSKK

SEQ ID NO: 7659 - protein, 18 aa, Homo sapiens
  Table 4 sequence identifier: P39687_C123
  MOD_RES (8)..(8): May or may not be conjugated to a chemical probe
KSLDLFNCEVTNLNDYRE

SEQ ID NO: 7660 - protein, 25 aa, Homo sapiens
  Table 4 sequence identifier: P27708_C1889
  MOD_RES (16)..(16): May or may not be conjugated to a chemical probe
RKVAEPELMGTPDGTCYPPPPVPRQ

SEQ ID NO: 7661 - protein, 19 aa, Homo sapiens
  Table 4 sequence identifier: Q15646_C188
  MOD_RES (10)..(10): May or may not be conjugated to a chemical probe
KACGGPGNFCPSFSELQRN

SEQ ID NO: 7662 - protein, 18 aa, Homo sapiens
  Table 4 sequence identifier: Q9ULA0_C413
  MOD_RES (6)..(6): May or may not be conjugated to a chemical probe
RNDTPCGTTIGPILASRL

SEQ ID NO: 7663 - protein, 18 aa, Homo sapiens
  Table 4 sequence identifier: Q9HAU5_C578
  MOD_RES (14)..(14): May or may not be conjugated to a chemical probe
KLIVDAFLQQLPNCVNRD

SEQ ID NO: 7664 - protein, 10 aa, Homo sapiens
  Table 4 sequence identifier: P50995_C384
  MOD_RES (7)..(7): May or may not be conjugated to a chemical probe
KFNAVLCSRS

SEQ ID NO: 7665 - protein, 8 aa, Homo sapiens
  Table 4 sequence identifier: P63220_C17
  MOD_RES (2)..(2): May or may not be conjugated to a chemical probe
KCSASNRI

SEQ ID NO: 7666 - protein, 14 aa, Homo sapiens
  Table 4 sequence identifier: Q16822_C306
  MOD_RES (11)..(11): May or may not be conjugated to a chemical probe
RYVAAAFPSACGKT

SEQ ID NO: 7667 - protein, 26 aa, Homo sapiens
  Table 4 sequence identifier: P14921_C31
  MOD_RES (14)..(14): May or may not be conjugated to a chemical probe
KVDLELFPSPDMECADVPLLTPSSKE

SEQ ID NO: 7668 - protein, 34 aa, Homo sapiens; identical to SEQ ID NO: 290
  Table 4 sequence identifier: Q9BWU1_C349
  MOD_RES (27)..(27): May or may not be conjugated to a chemical probe

SEQ ID NO: 7669 - protein, 20 aa, Homo sapiens
  Table 4 sequence identifier: P60174_C164
  MOD_RES (15)..(15): May or may not be conjugated to a chemical probe
KVAHALAEGLGVIACIGEKL

SEQ ID NO: 7670 - protein, 30 aa, Homo sapiens; identical to SEQ ID NO: 1102
  Table 4 sequence identifier: P55809_C67
  MOD_RES (17)..(17): May or may not be conjugated to a chemical probe

SEQ ID NO: 7671 - protein, 17 aa, Homo sapiens
  Table 4 sequence identifier: P54136_C369
  MOD_RES (8)..(8): May or may not be conjugated to a chemical probe
KIVFVPGCSIPLTIVKS

SEQ ID NO: 7672 - protein, 36 aa, Homo sapiens; identical to SEQ ID NO: 3408
  Table 4 sequence identifier: O60784_C415
  MOD_RES (14)..(14): May or may not be conjugated to a chemical probe

SEQ ID NO: 7673 - protein, 17 aa, Homo sapiens
  Table 4 sequence identifier: Q16630_C159
  MOD_RES (14)..(14): May or may not be conjugated to a chemical probe
KRELHGQNPVVTPCNKQ

SEQ ID NO: 7674 - protein, 27 aa, Homo sapiens
  Table 4 sequence identifier: Q13370_C410
  MOD_RES (14)..(14): May or may not be conjugated to a chemical probe
KINPLTPFPGFYPCSEIEDPAEKGDRK

SEQ ID NO: 7675 - protein, 30 aa, Homo sapiens
  Table 4 sequence identifier: P68104_C234
  MOD_RES (16)..(16): May or may not be conjugated to a chemical probe
KDGNASGTTLLEALDCILPPTRPTDKPLRL

SEQ ID NO: 7676 - protein, 29 aa, Homo sapiens
  Table 4 sequence identifier: P62937_C115
  MOD_RES (25)..(25): May or may not be conjugated to a chemical probe
KHTGPGILSMANAGPNTNGSQFFICTAKT

SEQ ID NO: 7677 - protein, 9 aa, Homo sapiens
  Table 4 sequence identifier: O75390_C211
  MOD_RES (4)..(4): May or may not be conjugated to a chemical probe
KLPCVAAKI

SEQ ID NO: 7678 - protein, 18 aa, Homo sapiens
  Table 4 sequence identifier: Q92688_C123
  MOD_RES (8)..(8): May or may not be conjugated to a chemical probe
KSLDLFNCEVTNLNDYRE

SEQ ID NO: 7679 - protein, 9 aa, Homo sapiens
  Table 4 sequence identifier: A6NHR9_C1656
  MOD_RES (2)..(2): May or may not be conjugated to a chemical probe
KCQVEEARL

SEQ ID NO: 7680 - protein, 28 aa, Homo sapiens
  Table 4 sequence identifier: Q3B7J2_C377
  MOD_RES (22)..(22): May or may not be conjugated to a chemical probe
RSGEWEAVEVLTEEPDTNQNLCEALQRN

SEQ ID NO: 7681 - protein, 19 aa, Homo sapiens
  Table 4 sequence identifier: O15523_C296
  MOD_RES (5)..(5): May or may not be conjugated to a chemical probe
RVRPCVVYGGADIGQQIRD

SEQ ID NO: 7682 - protein, 19 aa, Homo sapiens
  Table 4 sequence identifier: O00571_C298
  MOD_RES (5)..(5): May or may not be conjugated to a chemical probe
RVRPCVVYGGADIGQQIRD

SEQ ID NO: 7683 - protein, 12 aa, Homo sapiens
  Table 4 sequence identifier: P61158_C235
  MOD_RES (6)..(6): May or may not be conjugated to a chemical probe
RYSYVCPDLVKE

SEQ ID NO: 7684 - protein, 27 aa, Homo sapiens
  Table 4 sequence identifier: Q53EL6_C275
  MOD_RES (9)..(9): May or may not be conjugated to a chemical probe
RAVGDGILCNTYIDSYKGTVDCVQARA

SEQ ID NO: 7685 - protein, 14 aa, Homo sapiens
  Table 4 sequence identifier: P05388_C27
  MOD_RES (2)..(2): May or may not be conjugated to a chemical probe
KCFIVGADNVGSKQ

SEQ ID NO: 7686 - protein, 32 aa, Homo sapiens; identical to SEQ ID NO: 1618
  Table 4 sequence identifier: Q96I99_C162
  MOD_RES (3)..(3): May or may not be conjugated to a chemical probe

SEQ ID NO: 7687 - protein, 11 aa, Homo sapiens
  Table 4 sequence identifier: P08133_C114
  MOD_RES (2)..(2): May or may not be conjugated to a chemical probe
KCLIEILASRT

SEQ ID NO: 7688 - protein, 24 aa, Homo sapiens
  Table 4 sequence identifier: P09104_C389
  MOD_RES (18)..(18): May or may not be conjugated to a chemical probe
RSGETEDTFIADLVVGLCTGQIKT

SEQ ID NO: 7689 - protein, 24 aa, Homo sapiens
  Table 4 sequence identifier: P06733_C389
  MOD_RES (18)..(18): May or may not be conjugated to a chemical probe
RSGETEDTFIADLVVGLCTGQIKT

SEQ ID NO: 7690 - protein, 24 aa, Homo sapiens
  Table 4 sequence identifier: P13929_C389
  MOD_RES (18)..(18): May or may not be conjugated to a chemical probe
RSGETEDTFIADLVVGLCTGQIKT

SEQ ID NO: 7691 - protein, 19 aa, Homo sapiens
  Table 4 sequence identifier: P19838_C261
  MOD_RES (5)..(5): May or may not be conjugated to a chemical probe
RTAGCVTGGEEIYLLCDKV

SEQ ID NO: 7692 - protein, 13 aa, Homo sapiens
  Table 4 sequence identifier: Q96IJ6_C389
  MOD_RES (11)..(11): May or may not be conjugated to a chemical probe
KLLPAITILGCRV

SEQ ID NO: 7693 - protein, 8 aa, Homo sapiens
  Table 4 sequence identifier: P78527_C3187
  MOD_RES (2)..(2): May or may not be conjugated to a chemical probe
RCFFLSKI

SEQ ID NO: 7694 - protein, 14 aa, Homo sapiens
  Table 4 sequence identifier: P04083_C270
  MOD_RES (2)..(2): May or may not be conjugated to a chemical probe
KCATSKPAFFAEKL

SEQ ID NO: 7695 - protein, 19 aa, Homo sapiens
  Table 4 sequence identifier: Q86WV6_C309
  MOD_RES (17)..(17): May or may not be conjugated to a chemical probe
RTLEDILADAPESQNNCRL

SEQ ID NO: 7696 - protein, 13 aa, Homo sapiens
  Table 4 sequence identifier: P31949_C13
  MOD_RES (2)..(2): May or may not be conjugated to a chemical probe
RCIESLIAVFQKY

SEQ ID NO: 7697 - protein, 23 aa, Homo sapiens
  Table 4 sequence identifier: Q16181_C280
  MOD_RES (16)..(16): May or may not be conjugated to a chemical probe
RQYPWGVAEVENGEHCDFTILRN

SEQ ID NO: 7698 - protein, 15 aa, Homo sapiens
  Table 4 sequence identifier: P53621_C1185
  MOD_RES (2)..(2): May or may not be conjugated to a chemical probe
KCPLSGACYSPEFKG

SEQ ID NO: 7699 - protein, 20 aa, Homo sapiens
  Table 4 sequence identifier: O75179_C210
  MOD_RES (8)..(8): May or may not be conjugated to a chemical probe
RLTSSVSCALDEAAAALTRM

SEQ ID NO: 7700 - protein, 14 aa, Homo sapiens
  Table 4 sequence identifier: P62333_C193
  MOD_RES (9)..(9): May or may not be conjugated to a chemical probe
RAVASQLDCNFLKV

SEQ ID NO: 7701 - protein, 20 aa, Homo sapiens
  Table 4 sequence identifier: Q9Y5P6_C245
  MOD_RES (3)..(3): May or may not be conjugated to a chemical probe
RLCSGPGIVGNVLVDPSARI

SEQ ID NO: 7702 - protein, 11 aa, Homo sapiens
  Table 4 sequence identifier: P31948_C461
  MOD_RES (9)..(9): May or may not be conjugated to a chemical probe
KALDLDSSCKE

SEQ ID NO: 7703 - protein, 17 aa, Homo sapiens
  Table 4 sequence identifier: Q96P48_C900
  MOD_RES (9)..(9): May or may not be conjugated to a chemical probe
RAVFPEGPCEEPLQLRK

SEQ ID NO: 7704 - protein, 14 aa, Homo sapiens
  Table 4 sequence identifier: Q52LJ0_C216
  MOD_RES (8)..(8): May or may not be conjugated to a chemical probe
RINDALSCEYECRR

SEQ ID NO: 7705 - protein, 10 aa, Homo sapiens
  Table 4 sequence identifier: P46779_C13
  MOD_RES (3)..(3): May or may not be conjugated to a chemical probe
RNCSSFLIKR

SEQ ID NO: 7706 - protein, 35 aa, Homo sapiens
  Table 4 sequence identifier: Q8N5W9_C81
  MOD_RES (31)..(31): May or may not be conjugated to a chemical probe
RAAAPGTLEPDAAAATPAAPSPASLPLAPGCALRL

SEQ ID NO: 7707 - protein, 12 aa, Homo sapiens
  Table 4 sequence identifier: P50914_C54
  MOD_RES (2)..(2): May or may not be conjugated to a chemical probe
KCMQLTDFILKF

SEQ ID NO: 7708 - protein, 23 aa, Homo sapiens
  Table 4 sequence identifier: P00338_C293
  MOD_RES (10)..(10): May or may not be conjugated to a chemical probe
KDDVFLSVPCILGQNGISDLVKV

SEQ ID NO: 7709 - protein, 14 aa, Homo sapiens
  Table 4 sequence identifier: P62993_C32
  MOD_RES (7)..(7): May or may not be conjugated to a chemical probe
KVLNEECDQNWYKA

SEQ ID NO: 7710 - protein, 14 aa, Homo sapiens
  Table 4 sequence identifier: P85037_C439
  MOD_RES (10)..(10): May or may not be conjugated to a chemical probe
RSGGLQTPECLSRE

SEQ ID NO: 7711 - protein, 19 aa, Homo sapiens
  Table 4 sequence identifier: Q14103_C126
  MOD_RES (8)..(8): May or may not be conjugated to a chemical probe
KFGEVVDCTLKLDPITGRS

SEQ ID NO: 7712 - protein, 22 aa, Homo sapiens
  Table 4 sequence identifier: Q9NVA2_C41
  MOD_RES (8)..(8): May or may not be conjugated to a chemical probe
KSTSQGFCFNILCVGETGIGKS

SEQ ID NO: 7713 - protein, 21 aa, Homo sapiens
  Table 4 sequence identifier: P43403_C346
  MOD_RES (13)..(13): May or may not be conjugated to a chemical probe
RDNLLIADIELGCGNFGSVRQ

SEQ ID NO: 7714 - protein, 25 aa, Homo sapiens
  Table 4 sequence identifier: Q562E7_C130
  MOD_RES (17)..(17): May or may not be conjugated to a chemical probe
RLSYPLGGGLPFEDGSCGPETLTRF

SEQ ID NO: 7715 - protein, 16 aa, Homo sapiens
  Table 4 sequence identifier: O60610_C796
  MOD_RES (11)..(11): May or may not be conjugated to a chemical probe
KLVAEDLSQDCFWTKV

SEQ ID NO: 7716 - protein, 10 aa, Homo sapiens
  Table 4 sequence identifier: P08133_C552
  MOD_RES (7)..(7): May or may not be conjugated to a chemical probe
RFMTILCTRS

SEQ ID NO: 7717 - protein, 10 aa, Homo sapiens
  Table 4 sequence identifier: Q13418_C346
  MOD_RES (6)..(6): May or may not be conjugated to a chemical probe
KFSFQCPGRM

SEQ ID NO: 7718 - protein, 11 aa, Homo sapiens
  Table 4 sequence identifier: P49915_C523
  MOD_RES (9)..(9): May or may not be conjugated to a chemical probe
KTVGVQGDCRS

SEQ ID NO: 7719 - protein, 11 aa, Homo sapiens
  Table 4 sequence identifier: Q15459_C244
  MOD_RES (8)..(8): May or may not be conjugated to a chemical probe
REVLDQVCYRV

SEQ ID NO: 7720 - protein, 18 aa, Homo sapiens
  Table 4 sequence identifier: Q06124_C259
  MOD_RES (16)..(16): May or may not be conjugated to a chemical probe
KQGFWEEFETLQQQECKL

SEQ ID NO: 7721 - protein, 33 aa, Homo sapiens
  Table 4 sequence identifier: Q02338_C288
  MOD_RES (6)..(6): May or may not be conjugated to a chemical probe
KMETYCSSGSTDTSPVIDAVTHALTATTPYTRY

SEQ ID NO: 7722 - protein, 29 aa, Homo sapiens
  Table 4 sequence identifier: P46060_C338
  MOD_RES (14)..(14): May or may not be conjugated to a chemical probe
KLDLNGNTLGEEGCEQLQEVLEGFNMAKV

SEQ ID NO: 7723 - protein, 17 aa, Homo sapiens
  Table 4 sequence identifier: Q14204_C4216
  MOD_RES (4)..(4): May or may not be conjugated to a chemical probe
RSACDTVDTWLDDTAKG

SEQ ID NO: 7724 - protein, 19 aa, Homo sapiens
  Table 4 sequence identifier: P40926_C285
  MOD_RES (7)..(7): May or may not be conjugated to a chemical probe
KSQETECTYFSTPLLLGKK

SEQ ID NO: 7725 - protein, 9 aa, Homo sapiens
  Table 4 sequence identifier: Q9NX63_C112
  MOD_RES (3)..(3): May or may not be conjugated to a chemical probe
RICSEEERA

SEQ ID NO: 7726 - protein, 13 aa, Homo sapiens
  Table 4 sequence identifier: P62280_C116
  MOD_RES (10)..(10): May or may not be conjugated to a chemical probe
KNMSVHLSPCFRD

SEQ ID NO: 7727 - protein, 26 aa, Homo sapiens
  Table 4 sequence identifier: Q9BZV1_C125
  MOD_RES (17)..(17): May or may not be conjugated to a chemical probe
REEGSAHLAVPGVYFTCPLTGATLRK

SEQ ID NO: 7728 - protein, 19 aa, Homo sapiens
  Table 4 sequence identifier: O00299_C178
  MOD_RES (13)..(13): May or may not be conjugated to a chemical probe
KFLDGNELTLADCNLLPKL

SEQ ID NO: 7729 - protein, 17 aa, Homo sapiens
  Table 4 sequence identifier: O75592_C1131
  MOD_RES (2)..(2): May or may not be conjugated to a chemical probe
RCSILSPELALPTGSRA

SEQ ID NO: 7730 - protein, 13 aa, Homo sapiens
  Table 4 sequence identifier: P61601_C185
  MOD_RES (5)..(5): May or may not be conjugated to a chemical probe
RLLQCDPSSAGQF

SEQ ID NO: 7731 - protein, 10 aa, Homo sapiens
  Table 4 sequence identifier: P15498_C794
  MOD_RES (7)..(7): May or may not be conjugated to a chemical probe
KARYDFCARD

SEQ ID NO: 7732 - protein, 13 aa, Homo sapiens
  Table 4 sequence identifier: P12004_C81
  MOD_RES (2)..(2): May or may not be conjugated to a chemical probe
KCAGNEDIITLRA

SEQ ID NO: 7733 - protein, 10 aa, Homo sapiens
  Table 4 sequence identifier: P60981_C23
  MOD_RES (2)..(2): May or may not be conjugated to a chemical probe
KCSTPEEIKK

SEQ ID NO: 7734 - protein, 24 aa, Homo sapiens
  Table 4 sequence identifier: P14618_C474
  MOD_RES (8)..(8): May or may not be conjugated to a chemical probe
RGIFPVLCKDPVQEAWAEDVDLRV

SEQ ID NO: 7735 - protein, 32 aa, Homo sapiens; identical to SEQ ID NO: 1059
  Table 4 sequence identifier: Q9Y3F4_C340
  MOD_RES (22)..(22): May or may not be conjugated to a chemical probe

SEQ ID NO: 7736 - protein, 24 aa, Homo sapiens
  Table 4 sequence identifier: O75694_C704
  MOD_RES (12)..(12): May or may not be conjugated to a chemical probe
REITAIESSVPCQLLESVLQELKG

SEQ ID NO: 7737 - protein, 11 aa, Homo sapiens
  Table 4 sequence identifier: Q92888_C594
  MOD_RES (8)..(8): May or may not be conjugated to a chemical probe
KVELAAECCRE

SEQ ID NO: 7738 - protein, 11 aa, Homo sapiens
  Table 4 sequence identifier: O00264_C129
  MOD_RES (7)..(7): May or may not be conjugated to a chemical probe
RGLATFCLDKE

SEQ ID NO: 7739 - protein, 11 aa, Homo sapiens
  Table 4 sequence identifier: O15173_C159
  MOD_RES (7)..(7): May or may not be conjugated to a chemical probe
RGLATFCLDKE

SEQ ID NO: 7740 - protein, 21 aa, Homo sapiens
  Table 4 sequence identifier: Q15691_C228
  MOD_RES (7)..(7): May or may not be conjugated to a chemical probe
RNIELICQENEGENDPVLQRI

SEQ ID NO: 7741 - protein, 18 aa, Homo sapiens
  Table 4 sequence identifier: Q13325_C137
  MOD_RES (4)..(4): May or may not be conjugated to a chemical probe
KLECPETDCEKGWALLKF

SEQ ID NO: 7742 - protein, 19 aa, Homo sapiens
  Table 4 sequence identifier: Q9Y678_C296
  MOD_RES (14)..(14): May or may not be conjugated to a chemical probe
KELAPAVSVLQLFCSSPKA

SEQ ID NO: 7743 - protein, 34 aa, Homo sapiens; identical to SEQ ID NO: 3118
  Table 4 sequence identifier: Q5XKP0_C60
  MOD_RES (18)..(18): May or may not be conjugated to a chemical probe

SEQ ID NO: 7744 - protein, 16 aa, Homo sapiens
  Table 4 sequence identifier: O43776_C438
  MOD_RES (14)..(14): May or may not be conjugated to a chemical probe
RLMTDTINEPILLCRF

SEQ ID NO: 7745 - protein, 8 aa, Homo sapiens
  Table 4 sequence identifier: O75531_C85
  MOD_RES (4)..(4): May or may not be conjugated to a chemical probe
REWCDAFL

SEQ ID NO: 7746 - protein, 9 aa, Homo sapiens
  Table 4 sequence identifier: Q00577_C272
  MOD_RES (7)..(7): May or may not be conjugated to a chemical probe
KFGHTFCKY

SEQ ID NO: 7747 - protein, 12 aa, Homo sapiens
  Table 4 sequence identifier: P61758_C113
  MOD_RES (10)..(10): May or may not be conjugated to a chemical probe
RFLLADNLYCKA

SEQ ID NO: 7748 - protein, 29 aa, Homo sapiens
  Table 4 sequence identifier: P62330_C155
  MOD_RES (9)..(9): May or may not be conjugated to a chemical probe
RNWYVQPSCATSGDGLYEGLTWLTSNYKS

SEQ ID NO: 7749 - protein, 22 aa, Homo sapiens
  Table 4 sequence identifier: P09110_C381
  MOD_RES (17)..(17): May or may not be conjugated to a chemical probe
KVNPLGGAVALGHPLGCTGARQ

SEQ ID NO: 7750 - protein, 25 aa, Homo sapiens
  Table 4 sequence identifier: P60842_C134
  MOD_RES (17)..(17): May or may not be conjugated to a chemical probe
KVVMALGDYMGASCHACIGGTNVRA

SEQ ID NO: 7751 - protein, 10 aa, Homo sapiens
  Table 4 sequence identifier: Q8N1G4_C249
  MOD_RES (6)..(6): May or may not be conjugated to a chemical probe
KMVSGCQTRS

SEQ ID NO: 7752 - protein, 16 aa, Homo sapiens
  Table 4 sequence identifier: Q9Y5Z7_C673
  MOD_RES (3)..(3): May or may not be conjugated to a chemical probe
KTCIPGFPGAPSAVRI

SEQ ID NO: 7753 - protein, 13 aa, Homo sapiens
  Table 4 sequence identifier: P30485_C125
  MOD_RES (5)..(5): May or may not be conjugated to a chemical probe
RMFGCDVGPDGRL

SEQ ID NO: 7754 - protein, 24 aa, Homo sapiens
  Table 4 sequence identifier: P51812_C579
  MOD_RES (11)..(11): May or may not be conjugated to a chemical probe
RAENGLLMTPCYTANFVAPEVLKR

SEQ ID NO: 7755 - protein, 24 aa, Homo sapiens
  Table 4 sequence identifier: Q15418_C575
  MOD_RES (11)..(11): May or may not be conjugated to a chemical probe
RAENGLLMTPCYTANFVAPEVLKR

SEQ ID NO: 7756 - protein, 12 aa, Homo sapiens
  Table 4 sequence identifier: Q9P2J5_C554
  MOD_RES (7)..(7): May or may not be conjugated to a chemical probe
KNLETFCEETRR

SEQ ID NO: 7757 - protein, 19 aa, Homo sapiens
  Table 4 sequence identifier: P00558_C108
  MOD_RES (3)..(3): May or may not be conjugated to a chemical probe
KACANPAAGSVILLENLRF

SEQ ID NO: 7758 - protein, 19 aa, Homo sapiens
  Table 4 sequence identifier: O14966_C120
  MOD_RES (12)..(12): May or may not be conjugated to a chemical probe
KLTLPNGEPVPCLLLANKC

SEQ ID NO: 7759 - protein, 16 aa, Homo sapiens
  Table 4 sequence identifier: P13639_C591
  MOD_RES (12)..(12): May or may not be conjugated to a chemical probe
RETVSEESNVLCLSKS

SEQ ID NO: 7760 - protein, 38 aa, Homo sapiens
  Table 4 sequence identifier: P07195_C36
  MOD_RES (30)..(30): May or may not be conjugated to a chemical probe
KLIAPVAEEEATVPNNKITVVGVGQVGMACAISILGKS

SEQ ID NO: 7761 - protein, 31 aa, Homo sapiens; identical to SEQ ID NO: 1762
  Table 4 sequence identifier: Q96EY7_C642
  MOD_RES (24)..(24): May or may not be conjugated to a chemical probe

SEQ ID NO: 7762 - protein, 19 aa, Homo sapiens
  Table 4 sequence identifier: Q13469_C355
  MOD_RES (13)..(13): May or may not be conjugated to a chemical probe
RHIYPAVEFLGPCEQGERR

SEQ ID NO: 7763 - protein, 25 aa, Homo sapiens
  Table 4 sequence identifier: Q96JH7_C219
  MOD_RES (17)..(17): May or may not be conjugated to a chemical probe
KSQECLIPVHVDGDGHCLVHAVSRA

SEQ ID NO: 7764 - protein, 8 aa, Homo sapiens
  Table 4 sequence identifier: Q92619_C324
  MOD_RES (6)..(6): May or may not be conjugated to a chemical probe
KIAHNCRQ

SEQ ID NO: 7765 - protein, 14 aa, Homo sapiens
  Table 4 sequence identifier: O00148_C164
  MOD_RES (3)..(3): May or may not be conjugated to a chemical probe
KNCPHVVVGTPGRI

SEQ ID NO: 7766 - protein, 20 aa, Homo sapiens
  Table 4 sequence identifier: P16455_C150
  MOD_RES (4)..(4): May or may not be conjugated to a chemical probe
RVVCSSGAVGNYSGGLAVKE

SEQ ID NO: 7767 - protein, 18 aa, Homo sapiens
  Table 4 sequence identifier: P40763_C259
  MOD_RES (14)..(14): May or may not be conjugated to a chemical probe
RQQIACIGGPPNICLDRL

SEQ ID NO: 7768 - protein, 22 aa, Homo sapiens
  Table 4 sequence identifier: P07203_C202
  MOD_RES (21)..(21): May or may not be conjugated to a chemical probe
RFQTIDIEPDIEALLSQGPSCA

SEQ ID NO: 7769 - protein, 11 aa, Homo sapiens
  Table 4 sequence identifier: P08575_C787
  MOD_RES (3)..(3): May or may not be conjugated to a chemical probe
KRCPDYIIQKL

SEQ ID NO: 7770 - protein, 17 aa, Homo sapiens
  Table 4 sequence identifier: Q9Y6E0_C394
  MOD_RES (5)..(5): May or may not be conjugated to a chemical probe
KSQACGGNLGSIEELRG

SEQ ID NO: 7771 - protein, 11 aa, Homo sapiens
  Table 4 sequence identifier: B5ME19_C444
  MOD_RES (3)..(3): May or may not be conjugated to a chemical probe
RGCILTLVERM

SEQ ID NO: 7772 - protein, 13 aa, Homo sapiens
  Table 4 sequence identifier: P33240_C150
  MOD_RES (3)..(3): May or may not be conjugated to a chemical probe
KLCVQNSPQEARN

SEQ ID NO: 7773 - protein, 15 aa, Homo sapiens
  Table 4 sequence identifier: P52597_C267
  MOD_RES (6)..(6): May or may not be conjugated to a chemical probe
RDLSYCLSGMYDHRY

SEQ ID NO: 7774 - protein, 17 aa, Homo sapiens
  Table 4 sequence identifier: Q9H019_C52
  MOD_RES (14)..(14): May or may not be conjugated to a chemical probe
RASFETLPNISDLCLRD

SEQ ID NO: 7775 - protein, 16 aa, Homo sapiens
  Table 4 sequence identifier: Q9H479_C24
  MOD_RES (10)..(10): May or may not be conjugated to a chemical probe
RAFGGPGAGCISEGRA

SEQ ID NO: 7776 - protein, 18 aa, Homo sapiens
  Table 4 sequence identifier: O75369_C660
  MOD_RES (4)..(4): May or may not be conjugated to a chemical probe
KSGCIVNNLAEFTVDPKD

SEQ ID NO: 7777 - protein, 14 aa, Homo sapiens
  Table 4 sequence identifier: P62241_C100
  MOD_RES (3)..(3): May or may not be conjugated to a chemical probe
KNCIVLIDSTPYRQ

SEQ ID NO: 7778 - protein, 14 aa, Homo sapiens
  Table 4 sequence identifier: P30453_C188
  MOD_RES (8)..(8): May or may not be conjugated to a chemical probe
RAYLEGTCVEWLRR

SEQ ID NO: 7779 - protein, 14 aa, Homo sapiens
  Table 4 sequence identifier: P01892_C188
  MOD_RES (8)..(8): May or may not be conjugated to a chemical probe
RAYLEGTCVEWLRR

SEQ ID NO: 7780 - protein, 14 aa, Homo sapiens
  Table 4 sequence identifier: P01891_C188
  MOD_RES (8)..(8): May or may not be conjugated to a chemical probe
RAYLEGTCVEWLRR

SEQ ID NO: 7781 - protein, 14 aa, Homo sapiens
  Table 4 sequence identifier: P30479_C188
  MOD_RES (8)..(8): May or may not be conjugated to a chemical probe
RAYLEGTCVEWLRR

SEQ ID NO: 7782 - protein, 14 aa, Homo sapiens
  Table 4 sequence identifier: P30460_C188
  MOD_RES (8)..(8): May or may not be conjugated to a chemical probe
RAYLEGTCVEWLRR

SEQ ID NO: 7783 - protein, 22 aa, Homo sapiens
  Table 4 sequence identifier: P43250_C474
  MOD_RES (20)..(20): May or may not be conjugated to a chemical probe
RLGAGMLEPPFKPDPQAIYCKD

SEQ ID NO: 7784 - protein, 45 aa, Homo sapiens; identical to SEQ ID NO: 89
  Table 4 sequence identifier: Q96JB2_C65
  MOD_RES (19)..(19): May or may not be conjugated to a chemical probe

SEQ ID NO: 7785 - protein, 29 aa, Homo sapiens
  Table 4 sequence identifier: P22102_C646
  MOD_RES (14)..(14): May or may not be conjugated to a chemical probe
KSSLQYSSPAPDGCGDQTLGDLLLTPTRI

SEQ ID NO: 7786 - protein, 26 aa, Homo sapiens
  Table 4 sequence identifier: Q9BTC0_C1079
  MOD_RES (8)..(8): May or may not be conjugated to a chemical probe
KAYPVSGCFDYLSEDLPDTIHIGGRI

SEQ ID NO: 7787 - protein, 20 aa, Homo sapiens
  Table 4 sequence identifier: Q5SY16_C648
  MOD_RES (16)..(16): May or may not be conjugated to a chemical probe
RTVNCLLVGAIAIPHCVLKC

SEQ ID NO: 7788 - protein, 12 aa, Homo sapiens
  Table 4 sequence identifier: O75367_C297
  MOD_RES (3)..(3): May or may not be conjugated to a chemical probe
KNCLALADDKKL

SEQ ID NO: 7789 - protein, 14 aa, Homo sapiens
  Table 4 sequence identifier: P10314_C188
  MOD_RES (8)..(8): May or may not be conjugated to a chemical probe
RAYLEGTCVEWLRR

SEQ ID NO: 7790 - protein, 14 aa, Homo sapiens
  Table 4 sequence identifier: P30512_C188
  MOD_RES (8)..(8): May or may not be conjugated to a chemical probe
RAYLEGTCVEWLRR

SEQ ID NO: 7791 - protein, 14 aa, Homo sapiens
  Table 4 sequence identifier: P30510_C188
  MOD_RES (8)..(8): May or may not be conjugated to a chemical probe
RAYLEGTCVEWLRR

SEQ ID NO: 7792 - protein, 14 aa, Homo sapiens
  Table 4 sequence identifier: Q9TNN7_C188
  MOD_RES (8)..(8): May or may not be conjugated to a chemical probe
RAYLEGTCVEWLRR

SEQ ID NO: 7793 - protein, 14 aa, Homo sapiens
  Table 4 sequence identifier: P30459_C188
  MOD_RES (8)..(8): May or may not be conjugated to a chemical probe
RAYLEGTCVEWLRR

SEQ ID NO: 7794 - protein, 14 aa, Homo sapiens
  Table 4 sequence identifier: Q29963_C188
  MOD_RES (8)..(8): May or may not be conjugated to a chemical probe
RAYLEGTCVEWLRR

SEQ ID NO: 7795 - protein, 14 aa, Homo sapiens
  Table 4 sequence identifier: Q29960_C188
  MOD_RES (8)..(8): May or may not be conjugated to a chemical probe
RAYLEGTCVEWLRR

SEQ ID NO: 7796 - protein, 14 aa, Homo sapiens
  Table 4 sequence identifier: Q07000_C188
  MOD_RES (8)..(8): May or may not be conjugated to a chemical probe
RAYLEGTCVEWLRR

SEQ ID NO: 7797 - protein, 14 aa, Homo sapiens
  Table 4 sequence identifier: P16189_C188
  MOD_RES (8)..(8): May or may not be conjugated to a chemical probe
RAYLEGTCVEWLRR

SEQ ID NO: 7798 - protein, 14 aa, Homo sapiens
  Table 4 sequence identifier: Q29865_C188
  MOD_RES (8)..(8): May or may not be conjugated to a chemical probe
RAYLEGTCVEWLRR

SEQ ID NO: 7799 - protein, 14 aa, Homo sapiens
  Table 4 sequence identifier: P30504_C188
  MOD_RES (8)..(8): May or may not be conjugated to a chemical probe
RAYLEGTCVEWLRR

SEQ ID NO: 7800 - protein, 17 aa, Homo sapiens
  Table 4 sequence identifier: O60343_C1277
  MOD_RES (11)..(11): May or may not be conjugated to a chemical probe
KLLPADALVNCDLLLRD

SEQ ID NO: 7801 - protein, 9 aa, Homo sapiens
  Table 4 sequence identifier: Q14152_C478
  MOD_RES (3)..(3): May or may not be conjugated to a chemical probe
RHCDLQVRI

SEQ ID NO: 7802 - protein, 11 aa, Homo sapiens
  Table 4 sequence identifier: E9PMF8_C721
  MOD_RES (3)..(3): May or may not be conjugated to a chemical probe
KRCPDYIIQKL

SEQ ID NO: 7803 - protein, 16 aa, Homo sapiens
  Table 4 sequence identifier: Q01831_C60
  MOD_RES (3)..(3): May or may not be conjugated to a chemical probe
RGCSHPGGSADGPAKK

SEQ ID NO: 7804 - protein, 12 aa, Homo sapiens
  Table 4 sequence identifier: P55265_C773
  MOD_RES (7)..(7): May or may not be conjugated to a chemical probe
RWFPAVCAHSKK

SEQ ID NO: 7805 - protein, 25 aa, Homo sapiens
  Table 4 sequence identifier: P30153_C377
  MOD_RES (20)..(20): May or may not be conjugated to a chemical probe
KDNTIEHLLPLFLAQLKDECPEVRL

SEQ ID NO: 7806 - protein, 29 aa, Homo sapiens
  Table 4 sequence identifier: A6NE09_C148
  MOD_RES (21)..(21): May or may not be conjugated to a chemical probe
RADHQPLTEASYVNLPTIALCNTDSPLRY

SEQ ID NO: 7807 - protein, 13 aa, Homo sapiens
  Table 4 sequence identifier: Q9TNN7_C125
  MOD_RES (5)..(5): May or may not be conjugated to a chemical probe
RMYGCDLGPDGRL

SEQ ID NO: 7808 - protein, 13 aa, Homo sapiens
  Table 4 sequence identifier: Q95604_C125
  MOD_RES (5)..(5): May or may not be conjugated to a chemical probe
RMYGCDLGPDGRL

SEQ ID NO: 7809 - protein, 13 aa, Homo sapiens
  Table 4 sequence identifier: Q29963_C125
  MOD_RES (5)..(5): May or may not be conjugated to a chemical probe
RMYGCDLGPDGRL

SEQ ID NO: 7810 - protein, 13 aa, Homo sapiens
  Table 4 sequence identifier: Q29960_C125
  MOD_RES (5)..(5): May or may not be conjugated to a chemical probe
RMYGCDLGPDGRL

SEQ ID NO: 7811 - protein, 13 aa, Homo sapiens
  Table 4 sequence identifier: Q07000_C125
  MOD_RES (5)..(5): May or may not be conjugated to a chemical probe
RMYGCDLGPDGRL

SEQ ID NO: 7812 - protein, 8 aa, Homo sapiens
  Table 4 sequence identifier: Q9ULA0_C144
  MOD_RES (2)..(2): May or may not be conjugated to a chemical probe
KCPTSGRL

SEQ ID NO: 7813 - protein, 13 aa, Homo sapiens
  Table 4 sequence identifier: P53396_C20
  MOD_RES (4)..(4): May or may not be conjugated to a chemical probe
KFICTTSAIQNRF

SEQ ID NO: 7814 - protein, 16 aa, Homo sapiens
  Table 4 sequence identifier: P35251_C607
  MOD_RES (12)..(12): May or may not be conjugated to a chemical probe
KTIIGQQGDQSCANKL

SEQ ID NO: 7815 - protein, 17 aa, Homo sapiens
  Table 4 sequence identifier: Q8IZ69_C463
  MOD_RES (8)..(8): May or may not be conjugated to a chemical probe
RVIGVELCPEAVEDARV

SEQ ID NO: 7816 - protein, 32 aa, Homo sapiens; identical to SEQ ID NO: 4017
  Table 4 sequence identifier: O00567_C52
  MOD_RES (6)..(6): May or may not be conjugated to a chemical probe

SEQ ID NO: 7817 - protein, 13 aa, Homo sapiens
  Table 4 sequence identifier: Q5JSL3_C160
  MOD_RES (9)..(9): May or may not be conjugated to a chemical probe
KDEDSSSLCSQKG

SEQ ID NO: 7818 - protein, 23 aa, Homo sapiens
  Table 4 sequence identifier: P21333_C649
  MOD_RES (16)..(16): May or may not be conjugated to a chemical probe
RYWPQEAGEYAVHVLCNSEDIRL

SEQ ID NO: 7819 - protein, 12 aa, Homo sapiens
  Table 4 sequence identifier: P21291_C122
  MOD_RES (2)..(2): May or may not be conjugated to a chemical probe
RCSQAVYAAEKV

SEQ ID NO: 7820 - protein, 22 aa, Homo sapiens
  Table 4 sequence identifier: P22314_C278
  MOD_RES (11)..(11): May or may not be conjugated to a chemical probe
KVLGPYTFSICDTSNFSDYIRG

SEQ ID NO: 7821 - protein, 8 aa, Homo sapiens
  Table 4 sequence identifier: Q9P289_C410
  MOD_RES (2)..(2): May or may not be conjugated to a chemical probe
KCSADESP

SEQ ID NO: 7822 - protein, 10 aa, Homo sapiens
  Table 4 sequence identifier: P46782_C66
  MOD_RES (4)..(4): May or may not be conjugated to a chemical probe
KAQCPIVERL

SEQ ID NO: 7823 - protein, 11 aa, Homo sapiens
  Table 4 sequence identifier: Q92616_C1235
  MOD_RES (2)..(2): May or may not be conjugated to a chemical probe
RCGLALALNKL

SEQ ID NO: 7824 - protein, 17 aa, Homo sapiens
  Table 4 sequence identifier: P27707_C45
  MOD_RES (4)..(4): May or may not be conjugated to a chemical probe
KQLCEDWEVVPEPVARW

SEQ ID NO: 7825 - protein, 26 aa, Homo sapiens
  Table 4 sequence identifier: Q8NF91_C6415
  MOD_RES (16)..(16): May or may not be conjugated to a chemical probe
RLFVATALLPEETETCLFNQEILAKD

SEQ ID NO: 7826 - protein, 11 aa, Homo sapiens
  Table 4 sequence identifier: Q92538_C685
  MOD_RES (4)..(4): May or may not be conjugated to a chemical probe
RFSCLLPDPRE

SEQ ID NO: 7827 - protein, 14 aa, Homo sapiens
  Table 4 sequence identifier: P13639_C290
  MOD_RES (4)..(4): May or may not be conjugated to a chemical probe
RTFCQLILDPIFKV

SEQ ID NO: 7828 - protein, 8 aa, Homo sapiens
  Table 4 sequence identifier: Q15120_C41
  MOD_RES (5)..(5): May or may not be conjugated to a chemical probe
RDNACEKT

SEQ ID NO: 7829 - protein, 12 aa, Homo sapiens
  Table 4 sequence identifier: O43765_C153
  MOD_RES (4)..(4): May or may not be conjugated to a chemical probe
RAICIDPAYSKA

SEQ ID NO: 7830 - protein, 10 aa, Homo sapiens
  Table 4 sequence identifier: P63244_C182
  MOD_RES (8)..(8): May or may not be conjugated to a chemical probe
KVWNLANCKL

SEQ ID NO: 7831 - protein, 47 aa, Homo sapiens
  Table 4 sequence identifier: P61978_C145
  MOD_RES (43)..(43): May or may not be conjugated to a chemical probe
KIIPTLEEGLQLPSPTATSQLPLESDAVECLNYQHYKGSDFDCELRL

SEQ ID NO: 7832 - protein, 34 aa, Homo sapiens; identical to SEQ ID NO: 170
  Table 4 sequence identifier: Q9Y3D0_C93
  MOD_RES (22)..(22): May or may not be conjugated to a chemical probe

SEQ ID NO: 7833 - protein, 11 aa, Homo sapiens
  Table 4 sequence identifier: H3BQZ7_C405
  MOD_RES (9)..(9): May or may not be conjugated to a chemical probe
RALLPHVLCKN

SEQ ID NO: 7834 - protein, 11 aa, Homo sapiens
  Table 4 sequence identifier: Q1KMD3_C405
  MOD_RES (9)..(9): May or may not be conjugated to a chemical probe
RALLPHVLCKN

SEQ ID NO: 7835 - protein, 25 aa, Homo sapiens
  Table 4 sequence identifier: Q92888_C815
  MOD_RES (10)..(10): May or may not be conjugated to a chemical probe
RILSDLLPFCRPGPEGQLAATALRK

SEQ ID NO: 7836 - protein, 17 aa, Homo sapiens
  Table 4 sequence identifier: P30050_C17
  MOD_RES (2)..(2): May or may not be conjugated to a chemical probe
RCTGGEVGATSALAPKI

SEQ ID NO: 7837 - protein, 13 aa, Homo sapiens
  Table 4 sequence identifier: P27348_C134
  MOD_RES (8)..(8): May or may not be conjugated to a chemical probe
RYLAEVACGDDRK

SEQ ID NO: 7838 - protein, 28 aa, Homo sapiens
  Table 4 sequence identifier: Q9UPW5_C1164
  MOD_RES (26)..(26): May or may not be conjugated to a chemical probe
RLTSPLEYNLPSSLLDFENDLIESSCKV

SEQ ID NO: 7839 - protein, 13 aa, Homo sapiens
  Table 4 sequence identifier: Q13185_C177
  MOD_RES (7)..(7): May or may not be conjugated to a chemical probe
RLTWHSCPEDEAQ

SEQ ID NO: 7840 - protein, 13 aa, Homo sapiens
  Table 4 sequence identifier: P50914_C42
  MOD_RES (8)..(8): May or may not be conjugated to a chemical probe
RALVDGPCTQVRR

SEQ ID NO: 7841 - protein, 25 aa, Homo sapiens
  Table 4 sequence identifier: P60709_C217
  MOD_RES (3)..(3): May or may not be conjugated to a chemical probe
KLCYVALDFEQEMATAASSSSLEKS

SEQ ID NO: 7842 - protein, 25 aa, Homo sapiens
  Table 4 sequence identifier: Q6S8J3_C917
  MOD_RES (3)..(3): May or may not be conjugated to a chemical probe
KLCYVALDFEQEMATAASSSSLEKS

SEQ ID NO: 7843 - protein, 16 aa, Homo sapiens
  Table 4 sequence identifier: Q52LJ0_C63
  MOD_RES (4)..(4): May or may not be conjugated to a chemical probe
KSLCNLEESITSAGRD

SEQ ID NO: 7844 - protein, 13 aa, Homo sapiens
  Table 4 sequence identifier: Q8TAQ2_C495
  MOD_RES (8)..(8): May or may not be conjugated to a chemical probe
RNLAGDVCAIMRV

SEQ ID NO: 7845 - protein, 22 aa, Homo sapiens
  Table 4 sequence identifier: P04083_C324
  MOD_RES (8)..(8): May or may not be conjugated to a chemical probe
KMYGISLCQAILDETKGDYEKI

SEQ ID NO: 7846 - protein, 36 aa, Homo sapiens; identical to SEQ ID NO: 1393
  Table 4 sequence identifier: Q86VP6_C413
  MOD_RES (11)..(11): May or may not be conjugated to a chemical probe

SEQ ID NO: 7847 - protein, 19 aa, Homo sapiens
  Table 4 sequence identifier: P40925_C137
  MOD_RES (13)..(13): May or may not be conjugated to a chemical probe
KVIVVGNPANTNCLTASKS

SEQ ID NO: 7848 - protein, 10 aa, Homo sapiens
  Table 4 sequence identifier: P23528_C80
  MOD_RES (8)..(8): May or may not be conjugated to a chemical probe
KMLPDKDCRY

SEQ ID NO: 7849 - protein, 20 aa, Homo sapiens
  Table 4 sequence identifier: Q14C86_C568
  MOD_RES (5)..(5): May or may not be conjugated to a chemical probe
RFSLCSDNLEGISEGPSNRS

SEQ ID NO: 7850 - protein, 16 aa, Homo sapiens
  Table 4 sequence identifier: P62241_C182
  MOD_RES (13)..(13): May or may not be conjugated to a chemical probe
KLLACIASRPGQCGRA

SEQ ID NO: 7851 - protein, 10 aa, Homo sapiens
  Table 4 sequence identifier: Q86WR0_C83
  MOD_RES (8)..(8): May or may not be conjugated to a chemical probe
KANSIQGCKM

SEQ ID NO: 7852 - protein, 10 aa, Homo sapiens
  Table 4 sequence identifier: P00558_C50
  MOD_RES (3)..(3): May or may not be conjugated to a chemical probe
KFCLDNGAKS

SEQ ID NO: 7853 - protein, 24 aa, Homo sapiens
  Table 4 sequence identifier: O00743_C192
  MOD_RES (5)..(5): May or may not be conjugated to a chemical probe
KGAFCDLVWSDPEDVDTWAISPRG

SEQ ID NO: 7854 - protein, 25 aa, Homo sapiens
  Table 4 sequence identifier: O75934_C106
  MOD_RES (10)..(10): May or may not be conjugated to a chemical probe
KNDITAWQECVNNSMAQLEHQAVRI

SEQ ID NO: 7855 - protein, 29 aa, Homo sapiens
  Table 4 sequence identifier: Q92616_C1692
  MOD_RES (7)..(7): May or may not be conjugated to a chemical probe
KGMGESCFEDLLPWLMETLTYEQSSVDRS

SEQ ID NO: 7856 - protein, 12 aa, Homo sapiens
  Table 4 sequence identifier: Q63HN8_C1614
  MOD_RES (7)..(7): May or may not be conjugated to a chemical probe
RFSEVFCSVQRL

SEQ ID NO: 7857 - protein, 26 aa, Homo sapiens
  Table 4 sequence identifier: P17655_C405
  MOD_RES (16)..(16): May or may not be conjugated to a chemical probe
KLEEEDEDEEDGESGCTFLVGLIQKH

SEQ ID NO: 7858 - protein, 25 aa, Homo sapiens
  Table 4 sequence identifier: P43487_C132
  MOD_RES (15)..(15): May or may not be conjugated to a chemical probe
RAWVWNTHADFADECPKPELLAIRF

SEQ ID NO: 7859 - protein, 13 aa, Homo sapiens
  Table 4 sequence identifier: Q9BVP2_C251
  MOD_RES (10)..(10): May or may not be conjugated to a chemical probe
KLLGGFQETCSKA

SEQ ID NO: 7860 - protein, 36 aa, Homo sapiens; identical to SEQ ID NO: 4208
  Table 4 sequence identifier: O75995_C152
  MOD_RES (10)..(10): May or may not be conjugated to a chemical probe

SEQ ID NO: 7861 - protein, 27 aa, Homo sapiens
  Table 4 sequence identifier: Q7Z6Z7_C4341
  MOD_RES (12)..(12): May or may not be conjugated to a chemical probe
RSTDRLPSAHTCFNQLDLPAYESFEKL

SEQ ID NO: 7862 - protein, 18 aa, Homo sapiens
  Table 4 sequence identifier: P21333_C2107
  MOD_RES (5)..(5): May or may not be conjugated to a chemical probe
RVTYCPTEPGNYIINIKF

SEQ ID NO: 7863 - protein, 14 aa, Homo sapiens
  Table 4 sequence identifier: Q9UQ90_C353
  MOD_RES (11)..(11): May or may not be conjugated to a chemical probe
KGALLLGPPGCGKT

SEQ ID NO: 7864 - protein, 11 aa, Homo sapiens
  Table 4 sequence identifier: H3BN98_C196
  MOD_RES (8)..(8): May or may not be conjugated to a chemical probe
RQVLIRPCSKV

SEQ ID NO: 7865 - protein, 11 aa, Homo sapiens
  Table 4 sequence identifier: P62244_C30
  MOD_RES (8)..(8): May or may not be conjugated to a chemical probe
RQVLIRPCSKV

SEQ ID NO: 7866 - protein, 20 aa, Homo sapiens
  Table 4 sequence identifier: Q9UPN7_C455
  MOD_RES (14)..(14): May or may not be conjugated to a chemical probe
RILTSWEENDRVQCAGGPRK

SEQ ID NO: 7867 - protein, 24 aa, Homo sapiens
  Table 4 sequence identifier: P26641_C266
  MOD_RES (14)..(14): May or may not be conjugated to a chemical probe
KAAAPAPEEEMDECEQALAAEPKA

SEQ ID NO: 7868 - protein, 24 aa, Homo sapiens
  Table 4 sequence identifier: Q96F07_C346
  MOD_RES (16)..(16): May or may not be conjugated to a chemical probe
KWTCTQSSISPQYNICEQMVQIRD

SEQ ID NO: 7869 - protein, 17 aa, Homo sapiens
  Table 4 sequence identifier: Q16555_C504
  MOD_RES (9)..(9): May or may not be conjugated to a chemical probe
RGLYDGPVCEVSVTPKT

SEQ ID NO: 7870 - protein, 20 aa, Homo sapiens
  Table 4 sequence identifier: Q9H3U1_C426
  MOD_RES (14)..(14): May or may not be conjugated to a chemical probe
RAIQTVSCLLQGPCDAGNRA

SEQ ID NO: 7871 - protein, 17 aa, Homo sapiens
  Table 4 sequence identifier: Q9UBT2_C30
  MOD_RES (12)..(12): May or may not be conjugated to a chemical probe
RVLVVGAGGIGCELLKN

SEQ ID NO: 7872 - protein, 26 aa, Homo sapiens
  Table 4 sequence identifier: O60333_C1661
  MOD_RES (6)..(6): May or may not be conjugated to a chemical probe
RASSPCPEFEQFQIVPAVETPYLARA

SEQ ID NO: 7873 - protein, 17 aa, Homo sapiens
  Table 4 sequence identifier: P35579_C1379
  MOD_RES (8)..(8): May or may not be conjugated to a chemical probe
KMEDSVGCLETAEEVKR

SEQ ID NO: 7874 - protein, 15 aa, Homo sapiens
  Table 4 sequence identifier: P17844_C170
  MOD_RES (7)..(7): May or may not be conjugated to a chemical probe
RGDGPICLVLAPTRE

SEQ ID NO: 7875 - protein, 15 aa, Homo sapiens
  Table 4 sequence identifier: Q92841_C247
  MOD_RES (7)..(7): May or may not be conjugated to a chemical probe
RGDGPICLVLAPTRE

SEQ ID NO: 7876 - protein, 17 aa, Homo sapiens
  Table 4 sequence identifier: I3L3Q1_C657
  MOD_RES (15)..(15): May or may not be conjugated to a chemical probe
KSAMSEIEGIQSLICRQ

SEQ ID NO: 7877 - protein, 17 aa, Homo sapiens
  Table 4 sequence identifier: Q6ZSZ5_C699
  MOD_RES (15)..(15): May or may not be conjugated to a chemical probe
KSAMSEIEGIQSLICRQ

SEQ ID NO: 7878 - protein, 13 aa, Homo sapiens
  Table 4 sequence identifier: Q15233_C145
  MOD_RES (4)..(4): May or may not be conjugated to a chemical probe
RFACHSASLTVRN

SEQ ID NO: 7879 - protein, 11 aa, Homo sapiens
  Table 4 sequence identifier: Q9Y490_C1202
  MOD_RES (5)..(5): May or may not be conjugated to a chemical probe
RCVSCLPGQRD

SEQ ID NO: 7880 - protein, 12 aa, Homo sapiens
  Table 4 sequence identifier: Q9H0C8_C301
  MOD_RES (2)..(2): May or may not be conjugated to a chemical probe
RCGVTSVPDIRR

SEQ ID NO: 7881 - protein, 8 aa, Homo sapiens
  Table 4 sequence identifier: Q63HN8_C4111
  MOD_RES (3)..(3): May or may not be conjugated to a chemical probe
RHCEHTKS

SEQ ID NO: 7882 - protein, 19 aa, Homo sapiens
  Table 4 sequence identifier: P54886_C612
  MOD_RES (8)..(8): May or may not be conjugated to a chemical probe
KCEYPAACNALETLLIHRD

SEQ ID NO: 7883 - protein, 14 aa, Homo sapiens
  Table 4 sequence identifier: Q9Y613_C502
  MOD_RES (9)..(9): May or may not be conjugated to a chemical probe
RTPQSPAPCVLLRA

SEQ ID NO: 7884 - protein, 21 aa, Homo sapiens
  Table 4 sequence identifier: Q86TI0_C604
  MOD_RES (12)..(12): May or may not be conjugated to a chemical probe
RANTLSHFPIECQEPPQPARG

SEQ ID NO: 7885 - protein, 29 aa, Homo sapiens
  Table 4 sequence identifier: O60234_C96
  MOD_RES (16)..(16): May or may not be conjugated to a chemical probe
RVSYPLCFIFSSPVGCKPEQQMMYAGSKN

SEQ ID NO: 7886 - protein, 29 aa, Homo sapiens
  Table 4 sequence identifier: P60983_C96
  MOD_RES (16)..(16): May or may not be conjugated to a chemical probe
RVSYPLCFIFSSPVGCKPEQQMMYAGSKN

SEQ ID NO: 7887 - protein, 41 aa, Homo sapiens
  Table 4 sequence identifier: Q9UIS9_C486
  MOD_RES (27)..(27): May or may not be conjugated to a chemical probe
REGASSPVQVPGPVAASTEALLQEAQCSGLSWVVALPQVKQ

SEQ ID NO: 7888 - protein, 24 aa, Homo sapiens
  Table 4 sequence identifier: Q9HB19_C332
  MOD_RES (22)..(22): May or may not be conjugated to a chemical probe
RSISLTRPGSSSLSSGPNSILCRG

SEQ ID NO: 7889 - protein, 29 aa, Homo sapiens
  Table 4 sequence identifier: O60234_C87
  MOD_RES (7)..(7): May or may not be conjugated to a chemical probe
RVSYPLCFIFSSPVGCKPEQQMMYAGSKN

SEQ ID NO: 7890 - protein, 29 aa, Homo sapiens
  Table 4 sequence identifier: P60983_C87
  MOD_RES (7)..(7): May or may not be conjugated to a chemical probe
RVSYPLCFIFSSPVGCKPEQQMMYAGSKN

SEQ ID NO: 7891 - protein, 19 aa, Homo sapiens
  Table 4 sequence identifier: Q6FI81_C288
  MOD_RES (5)..(5): May or may not be conjugated to a chemical probe
RCASCPYLGMPAFKPGEKV

SEQ ID NO: 7892 - protein, 40 aa, Homo sapiens
  Table 4 sequence identifier: Q5T4S7_C1230
  MOD_RES (21)..(21): May or may not be conjugated to a chemical probe
KANTLGPTLVQNLPSSVQTVCESWNNINTNEFPNIGSWRN

SEQ ID NO: 7893 - protein, 10 aa, Homo sapiens
  Table 4 sequence identifier: Q01826_C173
  MOD_RES (7)..(7): May or may not be conjugated to a chemical probe
KIQLHSCPKL

SEQ ID NO: 7894 - protein, 11 aa, Homo sapiens
  Table 4 sequence identifier: Q9Y490_C1199
  MOD_RES (2)..(2): May or may not be conjugated to a chemical probe
RCVSCLPGQRD

SEQ ID NO: 7895 - protein, 20 aa, Homo sapiens
  Table 4 sequence identifier: Q16656_C229
  MOD_RES (4)..(4): May or may not be conjugated to a chemical probe
KESCKPIWWPEDIPWANVRS

SEQ ID NO: 7896 - protein, 9 aa, Homo sapiens
  Table 4 sequence identifier: P60866_C36
  MOD_RES (3)..(3): May or may not be conjugated to a chemical probe
KVCADLIRG

SEQ ID NO: 7897 - protein, 11 aa, Homo sapiens
  Table 4 sequence identifier: Q9H361_C132
  MOD_RES (4)..(4): May or may not be conjugated to a chemical probe
KVVCDENGSKG

SEQ ID NO: 7898 - protein, 11 aa, Homo sapiens
  Table 4 sequence identifier: Q13310_C132
  MOD_RES (4)..(4): May or may not be conjugated to a chemical probe
KVVCDENGSKG

SEQ ID NO: 7899 - protein, 11 aa, Homo sapiens
  Table 4 sequence identifier: P11940_C132
  MOD_RES (4)..(4): May or may not be conjugated to a chemical probe
KVVCDENGSKG

SEQ ID NO: 7900 - protein, 15 aa, Homo sapiens
  Table 4 sequence identifier: P31943_C267
  MOD_RES (6)..(6): May or may not be conjugated to a chemical probe
RDLNYCFSGMSDHRY

SEQ ID NO: 7901 - protein, 11 aa, Homo sapiens
  Table 4 sequence identifier: O43390_C99
  MOD_RES (6)..(6): May or may not be conjugated to a chemical probe
KSAFLCGVMKT

SEQ ID NO: 7902 - protein, 11 aa, Homo sapiens
  Table 4 sequence identifier: O60506_C96
  MOD_RES (6)..(6): May or may not be conjugated to a chemical probe
KSAFLCGVMKT

SEQ ID NO: 7903 - protein, 16 aa, Homo sapiens
  Table 4 sequence identifier: P36578_C208
  MOD_RES (4)..(4): May or may not be conjugated to a chemical probe
RGPCIIYNEDNGIIKA

SEQ ID NO: 7904 - protein, 32 aa, Homo sapiens
  Table 4 sequence identifier: O75170_C247
  MOD_RES (25)..(25): May or may not be conjugated to a chemical probe
RDQGSQLQEALEPDPLLTALESQDCVEQLLKN

SEQ ID NO: 7905 - protein, 18 aa, Homo sapiens
  Table 4 sequence identifier: Q14644_C58
  MOD_RES (4)..(4): May or may not be conjugated to a chemical probe
KSLCPFYGEDFYCEIPRS

SEQ ID NO: 7906 - protein, 15 aa, Homo sapiens
  Table 4 sequence identifier: Q01433_C230
  MOD_RES (2)..(2): May or may not be conjugated to a chemical probe
KCGVPFTDLLDAAKS

SEQ ID NO: 7907 - protein, 15 aa, Homo sapiens
  Table 4 sequence identifier: P55795_C267
  MOD_RES (6)..(6): May or may not be conjugated to a chemical probe
RDLNYCFSGMSDHRY

SEQ ID NO: 7908 - protein, 14 aa, Homo sapiens
  Table 4 sequence identifier: P63104_C94
  MOD_RES (4)..(4): May or may not be conjugated to a chemical probe
RDICNDVLSLLEKF

SEQ ID NO: 7909 - protein, 30 aa, Homo sapiens; identical to SEQ ID NO: 4369
  Table 4 sequence identifier: Q9BXK1_C233
  MOD_RES (11)..(11): May or may not be conjugated to a chemical probe

SEQ ID NO: 7910 - protein, 19 aa, Homo sapiens
  Table 4 sequence identifier: Q9UKV8_C188
  MOD_RES (10)..(10): May or may not be conjugated to a chemical probe
RSFFTASEGCSNPLGGGRE

SEQ ID NO: 7911 - protein, 24 aa, Homo sapiens
  Table 4 sequence identifier: Q9NVM9_C349
  MOD_RES (14)..(14): May or may not be conjugated to a chemical probe
RISPVDVNSRPSSCLTNFLLNGRS

SEQ ID NO: 7912 - protein, 11 aa, Homo sapiens
  Table 4 sequence identifier: P24928_C981
  MOD_RES (6)..(6): May or may not be conjugated to a chemical probe
KVVLPCNLLRM

SEQ ID NO: 7913 - protein, 22 aa, Homo sapiens
  Table 4 sequence identifier: Q15283_C314
  MOD_RES (5)..(5): May or may not be conjugated to a chemical probe
RLNICYTEDYVLPSEYYGPLKT

SEQ ID NO: 7914 - protein, 15 aa, Homo sapiens
  Table 4 sequence identifier: P61224_C141
  MOD_RES (6)..(6): May or may not be conjugated to a chemical probe
RQWNNCAFLESSAKS

SEQ ID NO: 7915 - protein, 14 aa, Homo sapiens
  Table 4 sequence identifier: P13804_C155
  MOD_RES (10)..(10): May or may not be conjugated to a chemical probe
RTIYAGNALCTVKC

SEQ ID NO: 7916 - protein, 23 aa, Homo sapiens
  Table 4 sequence identifier: Q14353_C91
  MOD_RES (15)..(15): May or may not be conjugated to a chemical probe
KVQEAPIDEHWIIECNDGVFQRL

SEQ ID NO: 7917 - protein, 11 aa, Homo sapiens
  Table 4 sequence identifier: Q92616_C1595
  MOD_RES (2)..(2): May or may not be conjugated to a chemical probe
KCLQTLLDTKF

SEQ ID NO: 7918 - protein, 34 aa, Homo sapiens; identical to SEQ ID NO: 1884
  Table 4 sequence identifier: O75995_C351
  MOD_RES (5)..(5): May or may not be conjugated to a chemical probe

SEQ ID NO: 7919 - protein, 17 aa, Homo sapiens
  Table 4 sequence identifier: Q9H270_C890
  MOD_RES (2)..(2): May or may not be conjugated to a chemical probe
RCSNDSFSVIADYFGRG

SEQ ID NO: 7920 - protein, 21 aa, Homo sapiens
  Table 4 sequence identifier: P31948_C26
  MOD_RES (14)..(14): May or may not be conjugated to a chemical probe
KALSVGNIDDALQCYSEAIKL

SEQ ID NO: 7921 - protein, 21 aa, Homo sapiens
  Table 4 sequence identifier: Q13303_C248
  MOD_RES (14)..(14): May or may not be conjugated to a chemical probe
KIGVGAMTWSPLACGIVSGKY

SEQ ID NO: 7922 - protein, 38 aa, Homo sapiens; identical to SEQ ID NO: 336
  Table 4 sequence identifier: Q86X76_C165
  MOD_RES (5)..(5): May or may not be conjugated to a chemical probe

SEQ ID NO: 7923 - protein, 36 aa, Homo sapiens; identical to SEQ ID NO: 2731
  Table 4 sequence identifier: P31146_C285
  MOD_RES (33)..(33): May or may not be conjugated to a chemical probe

SEQ ID NO: 7924 - protein, 24 aa, Homo sapiens
  Table 4 sequence identifier: Q02750_C277
  MOD_RES (9)..(9): May or may not be conjugated to a chemical probe
KELELMFGCQVEGDAAETPPRPRT

SEQ ID NO: 7925 - protein, 21 aa, Homo sapiens
  Table 4 sequence identifier: O95758_C68
  MOD_RES (4)..(4): May or may not be conjugated to a chemical probe
KIPCDVTEAEIISLGLPFGKV

SEQ ID NO: 7926 - protein, 26 aa, Homo sapiens
  Table 4 sequence identifier: P53621_C380
  MOD_RES (23)..(23): May or may not be conjugated to a chemical probe
RSGSKFPVFNMSYNPAENAVLLCTRA

SEQ ID NO: 7927 - protein, 16 aa, Homo sapiens
  Table 4 sequence identifier: Q9BUJ2_C487
  MOD_RES (12)..(12): May or may not be conjugated to a chemical probe
RWDVLIQQATQCLNRL

SEQ ID NO: 7928 - protein, 9 aa, Homo sapiens
  Table 4 sequence identifier: Q92619_C469
  MOD_RES (3)..(3): May or may not be conjugated to a chemical probe
RTCVADAKT

SEQ ID NO: 7929 - protein, 10 aa, Homo sapiens
  Table 4 sequence identifier: Q9Y228_C380
  MOD_RES (4)..(4): May or may not be conjugated to a chemical probe
KIECLQGDRD

SEQ ID NO: 7930 - protein, 10 aa, Homo sapiens
  Table 4 sequence identifier: Q9BW61_C25
  MOD_RES (8)..(8): May or may not be conjugated to a chemical probe
RFHADSVCKA

SEQ ID NO: 7931 - protein, 14 aa, Homo sapiens
  Table 4 sequence identifier: P21333_C1018
  MOD_RES (12)..(12): May or may not be conjugated to a chemical probe
KIVGPSGAAVPCKV

SEQ ID NO: 7932 - protein, 21 aa, Homo sapiens
  Table 4 sequence identifier: O75427_C105
  MOD_RES (2)..(2): May or may not be conjugated to a chemical probe
RCLNPALGNLTALTYLNLSRN

SEQ ID NO: 7933 - protein, 17 aa, Homo sapiens
  Table 4 sequence identifier: P22314_C481
  MOD_RES (12)..(12): May or may not be conjugated to a chemical probe
KYFLVGAGAIGCELLKN

SEQ ID NO: 7934 - protein, 20 aa, Homo sapiens
  Table 4 sequence identifier: Q8N7H5_C218
  MOD_RES (7)..(7): May or may not be conjugated to a chemical probe
KMWINPCAQVIFDSDPAPKD

SEQ ID NO: 7935 - protein, 28 aa, Homo sapiens
  Table 4 sequence identifier: Q16644_C203
  MOD_RES (12)..(12): May or may not be conjugated to a chemical probe
KETTQNALQTPCYTPYYVAPEVLGPEKY

SEQ ID NO: 7936 - protein, 12 aa, Homo sapiens
  Table 4 sequence identifier: Q6PD62_C196
  MOD_RES (6)..(6): May or may not be conjugated to a chemical probe
RTNPGCPAEVRL

SEQ ID NO: 7937 - protein, 9 aa, Homo sapiens
  Table 4 sequence identifier: P23919_C163
  MOD_RES (2)..(2): May or may not be conjugated to a chemical probe
RCFHQLMKD

SEQ ID NO: 7938 - protein, 48 aa, Homo sapiens; identical to SEQ ID NO: 3785
  Table 4 sequence identifier: Q9UKG1_C462
  MOD_RES (39)..(39): May or may not be conjugated to a chemical probe

SEQ ID NO: 7939 - protein, 15 aa, Homo sapiens
  Table 4 sequence identifier: Q13155_C306
  MOD_RES (3)..(3): May or may not be conjugated to a chemical probe
RSCENLAPFNTALKL

SEQ ID NO: 7940 - protein, 15 aa, Homo sapiens
  Table 4 sequence identifier: Q99439_C215
  MOD_RES (2)..(2): May or may not be conjugated to a chemical probe
KCASQVGMTAPGTRR

SEQ ID NO: 7941 - protein, 18 aa, Homo sapiens
  Table 4 sequence identifier: Q99832_C450
  MOD_RES (4)..(4): May or may not be conjugated to a chemical probe
RQLCDNAGFDATNILNKL

SEQ ID NO: 7942 - protein, 17 aa, Homo sapiens
  Table 4 sequence identifier: Q8IXI2_C175
  MOD_RES (12)..(12): May or may not be conjugated to a chemical probe
KAVLHPTGPLYCPEEKE

SEQ ID NO: 7943 - protein, 20 aa, Homo sapiens
  Table 4 sequence identifier: Q9Y4W2_C474
  MOD_RES (11)..(11): May or may not be conjugated to a chemical probe
RMVESCLGSPCWASPQLLRI

SEQ ID NO: 7944 - protein, 11 aa, Homo sapiens
  Table 4 sequence identifier: P13716_C223
  MOD_RES (2)..(2): May or may not be conjugated to a chemical probe
RCYQLPPGARG

SEQ ID NO: 7945 - protein, 27 aa, Homo sapiens
  Table 4 sequence identifier: Q8IWX8_C168
  MOD_RES (24)..(24): May or may not be conjugated to a chemical probe
KLLEETQLDMNEFDNLLQPIIDTCTKD

SEQ ID NO: 7946 - protein, 11 aa, Homo sapiens
  Table 4 sequence identifier: P08575_C1167
  MOD_RES (9)..(9): May or may not be conjugated to a chemical probe
KSTPLLIHCRD

SEQ ID NO: 7947 - protein, 18 aa, Homo sapiens
  Table 4 sequence identifier: E9PPU0_C406
  MOD_RES (14)..(14): May or may not be conjugated to a chemical probe
RLLDAQLATGGLVCPARR

SEQ ID NO: 7948 - protein, 10 aa, Homo sapiens
  Table 4 sequence identifier: P15170_C327
  MOD_RES (8)..(8): May or may not be conjugated to a chemical probe
KLESGSICKG

SEQ ID NO: 7949 - protein, 29 aa, Homo sapiens
  Table 4 sequence identifier: Q9NZN3_C138
  MOD_RES (4)..(4): May or may not be conjugated to a chemical probe
RFVCAQLPNPVLESISVIDTPGILSGEKQ

SEQ ID NO: 7950 - protein, 18 aa, Homo sapiens
  Table 4 sequence identifier: Q8WUH2_C826
  MOD_RES (11)..(11): May or may not be conjugated to a chemical probe
KLCQICQNPFCEPVFVRY

SEQ ID NO: 7951 - protein, 29 aa, Homo sapiens
  Table 4 sequence identifier: Q9BZZ5_C234
  MOD_RES (25)..(25): May or may not be conjugated to a chemical probe
RQQLVELVAEQADLEQTFNPSDPDCVDRL

SEQ ID NO: 7952 - protein, 13 aa, Homo sapiens
  Table 4 sequence identifier: P53992_C910
  MOD_RES (9)..(9): May or may not be conjugated to a chemical probe
KLLPVYLNCVLKS

SEQ ID NO: 7953 - protein, 26 aa, Homo sapiens
  Table 4 sequence identifier: O15027_C1619
  MOD_RES (16)..(16): May or may not be conjugated to a chemical probe
RTEAYEYAQSLGAETCPLPSFQVFKF

SEQ ID NO: 7954 - protein, 16 aa, Homo sapiens
  Table 4 sequence identifier: O43791_C361
  MOD_RES (8)..(8): May or may not be conjugated to a chemical probe
RSLASAQCPFLGPPRK

SEQ ID NO: 7955 - protein, 14 aa, Homo sapiens
  Table 4 sequence identifier: O95202_C552
  MOD_RES (11)..(11): May or may not be conjugated to a chemical probe
KEEIDILSDACSKL

SEQ ID NO: 7956 - protein, 23 aa, Homo sapiens
  Table 4 sequence identifier: Q9NZ09_C161
  MOD_RES (11)..(11): May or may not be conjugated to a chemical probe
KADFNLADFECEEDPFDNLELKT

SEQ ID NO: 7957 - protein, 24 aa, Homo sapiens
  Table 4 sequence identifier: P45880_C103
  MOD_RES (19)..(19): May or may not be conjugated to a chemical probe
KWNTDNTLGTEIAIEDQICQGLKL

SEQ ID NO: 7958 - protein, 20 aa, Homo sapiens
  Table 4 sequence identifier: Q8IWB7_C401
  MOD_RES (11)..(11): May or may not be conjugated to a chemical probe
KIWDMTPVVGCSLATGFSPH

SEQ ID NO: 7959 - protein, 15 aa, Homo sapiens
  Table 4 sequence identifier: O60216_C585
  MOD_RES (13)..(13): May or may not be conjugated to a chemical probe
KTGAESISLLELCRN

SEQ ID NO: 7960 - protein, 11 aa, Homo sapiens
  Table 4 sequence identifier: O00567_C142
  MOD_RES (9)..(9): May or may not be conjugated to a chemical probe
KGLTDLSACKA

SEQ ID NO: 7961 - protein, 23 aa, Homo sapiens
  Table 4 sequence identifier: P55265_C649
  MOD_RES (5)..(5): May or may not be conjugated to a chemical probe
KFQYCVAVGAQTFPSVSAPSKKV

SEQ ID NO: 7962 - protein, 12 aa, Homo sapiens
  Table 4 sequence identifier: Q8WYP5_C521
  MOD_RES (2)..(2): May or may not be conjugated to a chemical probe
RCLVAGLLSPRF

SEQ ID NO: 7963 - protein, 33 aa, Homo sapiens; identical to SEQ ID NO: 2427
  Table 4 sequence identifier: Q6PKG0_C502
  MOD_RES (26)..(26): May or may not be conjugated to a chemical probe

SEQ ID NO: 7964 - protein, 23 aa, Homo sapiens
  Table 4 sequence identifier: Q6PJW8_C192
  MOD_RES (6)..(6): May or may not be conjugated to a chemical probe
RALPLCLHQIAESYFQEEDYEKA

SEQ ID NO: 7965 - protein, 22 aa, Homo sapiens
  Table 4 sequence identifier: Q5VSL9_C418
  MOD_RES (19)..(19): May or may not be conjugated to a chemical probe
RDEVMPPPLQHPQTDRLTCPKG

SEQ ID NO: 7966 - protein, 13 aa, Homo sapiens
  Table 4 sequence identifier: Q92835_C385
  MOD_RES (5)..(5): May or may not be conjugated to a chemical probe
REGFCQLLQQMKN

SEQ ID NO: 7967 - protein, 9 aa, Homo sapiens
  Table 4 sequence identifier: Q00610_C736
  MOD_RES (7)..(7): May or may not be conjugated to a chemical probe
KYIQAACKT

SEQ ID NO: 7968 - protein, 9 aa, Homo sapiens
  Table 4 sequence identifier: Q14019_C10
  MOD_RES (7)..(7): May or may not be conjugated to a chemical probe
KIDKEACRA

SEQ ID NO: 7969 - protein, 14 aa, Homo sapiens
  Table 4 sequence identifier: Q9UEW8_C450
  MOD_RES (6)..(6): May or may not be conjugated to a chemical probe
REASSCAVNLVLRL

SEQ ID NO: 7970 - protein, 16 aa, Homo sapiens
  Table 4 sequence identifier: P22626_C50
  MOD_RES (5)..(5): May or may not be conjugated to a chemical probe
KLTDCVVMRDPASKRS

SEQ ID NO: 7971 - protein, 15 aa, Homo sapiens
  Table 4 sequence identifier: P55795_C22
  MOD_RES (7)..(7): May or may not be conjugated to a chemical probe
RGLPWSCSADEVMRF

SEQ ID NO: 7972 - protein, 11 aa, Homo sapiens
  Table 4 sequence identifier: Q8IXW5_C105
  MOD_RES (8)..(8): May or may not be conjugated to a chemical probe
KLCGYPLCQKK

SEQ ID NO: 7973 - protein, 20 aa, Homo sapiens
  Table 4 sequence identifier: Q92841_C584
  MOD_RES (17)..(17): May or may not be conjugated to a chemical probe
RTTSSANNPNLMYQDECDRR

SEQ ID NO: 7974 - protein, 27 aa, Homo sapiens
  Table 4 sequence identifier: P50552_C334
  MOD_RES (14)..(14): May or may not be conjugated to a chemical probe
KSSSSVTTSETQPCTPSSSDYSDLQRV

SEQ ID NO: 7975 - protein, 20 aa, Homo sapiens
  Table 4 sequence identifier: P29728_C523
  MOD_RES (13)..(13): May or may not be conjugated to a chemical probe
KSSDLPGGEFSTCFTVLQRN

SEQ ID NO: 7976 - protein, 24 aa, Homo sapiens
  Table 4 sequence identifier: Q9BUJ2_C391
  MOD_RES (6)..(6): May or may not be conjugated to a chemical probe
RAEPYCSVLPGFTFIQHLPLSERI

SEQ ID NO: 7977 - protein, 13 aa, Homo sapiens
  Table 4 sequence identifier: Q5VWQ0_C282
  MOD_RES (7)..(7): May or may not be conjugated to a chemical probe
KEVQTVCAGLTRI

SEQ ID NO: 7978 - protein, 25 aa, Homo sapiens
  Table 4 sequence identifier: O75369_C2556
  MOD_RES (18)..(18): May or may not be conjugated to a chemical probe
KAGSNMLLIGVHGPTTPCEEVSMKH

SEQ ID NO: 7979 - protein, 30 aa, Homo sapiens
  Table 4 sequence identifier: P04075_C178
  MOD_RES (6)..(6): May or may not be conjugated to a chemical probe
RYASICQQNGIVPIVEPEILPDGDHDLKRC

SEQ ID NO: 7980 - protein, 18 aa, Homo sapiens
  Table 4 sequence identifier: Q9UID3_C81
  MOD_RES (3)..(3): May or may not be conjugated to a chemical probe
RECPLAQLMDSETDMVRQ

SEQ ID NO: 7981 - protein, 24 aa, Homo sapiens
  Table 4 sequence identifier: Q9ULL5_C173
  MOD_RES (20)..(20): May or may not be conjugated to a chemical probe
KAGAGPPPGPPAYDPYGPYCPGRA

SEQ ID NO: 7982 - protein, 13 aa, Homo sapiens
  Table 4 sequence identifier: P14618_C423
  MOD_RES (2)..(2): May or may not be conjugated to a chemical probe
KCCSGAIIVLTKS

SEQ ID NO: 7983 - protein, 24 aa, Homo sapiens
  Table 4 sequence identifier: O15117_C778
  MOD_RES (19)..(19): May or may not be conjugated to a chemical probe
RSYLADNDGEIYDDIADGCIYDND

SEQ ID NO: 7984 - protein, 18 aa, Homo sapiens
  Table 4 sequence identifier: Q02880_C426
  MOD_RES (6)..(6): May or may not be conjugated to a chemical probe
KAASNCGIVESILNWVKF

SEQ ID NO: 7985 - protein, 13 aa, Homo sapiens
  Table 4 sequence identifier: P14618_C424
  MOD_RES (3)..(3): May or may not be conjugated to a chemical probe
KCCSGAIIVLTKS

SEQ ID NO: 7986 - protein, 51 aa, Homo sapiens
  Table 4 sequence identifier: O14976_C913
  MOD_RES (12)..(12): May or may not be conjugated to a chemical probe
KAPSSNTDLLSCLLGPPEAASQGPPEDLLSEDPLLLASPAPPLSVQSTPRG

SEQ ID NO: 7987 - protein, 22 aa, Homo sapiens
  Table 4 sequence identifier: Q14980_C1907
  MOD_RES (9)..(9): May or may not be conjugated to a chemical probe
RNSFYMGTCQDEPEQLDDWNRI

SEQ ID NO: 7988 - protein, 16 aa, Homo sapiens
  Table 4 sequence identifier: Q86WI3_C1190
  MOD_RES (13)..(13): May or may not be conjugated to a chemical probe
KSPFLLANTLSLCPRV

SEQ ID NO: 7989 - protein, 31 aa, Homo sapiens; identical to SEQ ID NO: 1054
  Table 4 sequence identifier: Q6IS14_C129
  MOD_RES (9)..(9): May or may not be conjugated to a chemical probe

SEQ ID NO: 7990 - protein, 18 aa, Homo sapiens
  Table 4 sequence identifier: Q9Y2X3_C106
  MOD_RES (6)..(6): May or may not be conjugated to a chemical probe
KLNLSCIHSPVVNELMRG

SEQ ID NO: 7991 - protein, 33 aa, Homo sapiens
  Table 4 sequence identifier: Q9NRG7_C78
  MOD_RES (15)..(15): May or may not be conjugated to a chemical probe
RITWDELAASGLPSCDAAVNLAGENILNPLRRW

SEQ ID NO: 7992 - protein, 42 aa, Homo sapiens
  Table 4 sequence identifier: Q14761_C134
  MOD_RES (29)..(29): May or may not be conjugated to a chemical probe
RQEDEQDTDYDHVADGGLQADPGEGEQQCGEASSPEQVPVRA

SEQ ID NO: 7993 - protein, 23 aa, Homo sapiens
  Table 4 sequence identifier: P30479_C349
  MOD_RES (10)..(10): May or may not be conjugated to a chemical probe
KGGSYSQAACSDSAQGSDVSLTA

SEQ ID NO: 7994 - protein, 23 aa, Homo sapiens
  Table 4 sequence identifier: P30460_C349
  MOD_RES (10)..(10): May or may not be conjugated to a chemical probe
KGGSYSQAACSDSAQGSDVSLTA

SEQ ID NO: 7995 - protein, 12 aa, Homo sapiens
  Table 4 sequence identifier: Q6KC79_C2151
  MOD_RES (10)..(10): May or may not be conjugated to a chemical probe
RSLFTVGALCRH

SEQ ID NO: 7996 - protein, 16 aa, Homo sapiens
  Table 4 sequence identifier: P26038_C284
  MOD_RES (6)..(6): May or may not be conjugated to a chemical probe
RILALCMGNHELYMRR

SEQ ID NO: 7997 - protein, 27 aa, Homo sapiens
  Table 4 sequence identifier: Q9UL15_C118
  MOD_RES (11)..(11): May or may not be conjugated to a chemical probe
KIVPFYNGGNCVTDEFEEGIQDIILRL

SEQ ID NO: 7998 - protein, 24 aa, Homo sapiens
  Table 4 sequence identifier: Q15022_C325
  MOD_RES (19)..(19): May or may not be conjugated to a chemical probe
RLQLLDGEYEVAMQEMEECPISKK

SEQ ID NO: 7999 - protein, 21 aa, Homo sapiens
  Table 4 sequence identifier: Q8NBZ0_C179
  MOD_RES (9)..(9): May or may not be conjugated to a chemical probe
KMAVGPPDCPVGGPLTFPGRG

SEQ ID NO: 8000 - protein, 41 aa, Homo sapiens
  Table 4 sequence identifier: P42226_C355
  MOD_RES (34)..(34): May or may not be conjugated to a chemical probe
RELSVPQGPGAGAESTGEIINNTVPLENSIPGNCCSALFKN

SEQ ID NO: 8001 - protein, 23 aa, Homo sapiens
  Table 4 sequence identifier: P37802_C63
  MOD_RES (7)..(7): May or may not be conjugated to a chemical probe
KDGTVLCELINALYPEGQAPVKK

SEQ ID NO: 8002 - protein, 13 aa, Homo sapiens
  Table 4 sequence identifier: O60313_C786
  MOD_RES (6)..(6): May or may not be conjugated to a chemical probe
RTQEQCVHNETKN

SEQ ID NO: 8003 - protein, 21 aa, Homo sapiens
  Table 4 sequence identifier: Q8TB24_C881
  MOD_RES (9)..(9): May or may not be conjugated to a chemical probe
RSSVQDFICVSYLEPEQQART

SEQ ID NO: 8004 - protein, 41 aa, Homo sapiens; identical to SEQ ID NO: 8000
  Table 4 sequence identifier: P42226_C356
  MOD_RES (35)..(35): May or may not be conjugated to a chemical probe

SEQ ID NO: 8005 - protein, 12 aa, Homo sapiens
  Table 4 sequence identifier: P13639_C693
  MOD_RES (6)..(6): May or may not be conjugated to a chemical probe
KEGALCEENMRG

SEQ ID NO: 8006 - protein, 10 aa, Homo sapiens
  Table 4 sequence identifier: P13010_C493
  MOD_RES (5)..(5): May or may not be conjugated to a chemical probe
RLFQCLLHRA

SEQ ID NO: 8007 - protein, 11 aa, Homo sapiens
  Table 4 sequence identifier: Q9NX46_C132
  MOD_RES (2)..(2): May or may not be conjugated to a chemical probe
KCRDVFEPARA

SEQ ID NO: 8008 - protein, 30 aa, Homo sapiens
  Table 4 sequence identifier: Q5RL73_C199
  MOD_RES (19)..(19): May or may not be conjugated to a chemical probe
KAALNTSAGNSNPYLPYSCELPLCYFSSKC

SEQ ID NO: 8009 - protein, 37 aa, Homo sapiens; identical to SEQ ID NO: 4138
  Table 4 sequence identifier: P09001_C338
  MOD_RES (27)..(27): May or may not be conjugated to a chemical probe

SEQ ID NO: 8010 - protein, 21 aa, Homo sapiens
  Table 4 sequence identifier: Q14204_C3089
  MOD_RES (2)..(2): May or may not be conjugated to a chemical probe
RCVLNWFGDWSTEALYQVGKE

SEQ ID NO: 8011 - protein, 8 aa, Homo sapiens
  Table 4 sequence identifier: Q15437_C767
  MOD_RES (8)..(8): May or may not be conjugated to a chemical probe
KLAVSSAC

SEQ ID NO: 8012 - protein, 26 aa, Homo sapiens
  Table 4 sequence identifier: P30040_C157
  MOD_RES (12)..(12): May or may not be conjugated to a chemical probe
KGQGVYLGMPGCLPVYDALAGEFIRA

SEQ ID NO: 8013 - protein, 13 aa, Homo sapiens
  Table 4 sequence identifier: Q9UQ35_C956
  MOD_RES (6)..(6): May or may not be conjugated to a chemical probe
RSVSPCSNVESRL

SEQ ID NO: 8014 - protein, 30 aa, Homo sapiens; identical to SEQ ID NO: 8008
  Table 4 sequence identifier: Q5RL73_C204
  MOD_RES (24)..(24): May or may not be conjugated to a chemical probe

SEQ ID NO: 8015 - protein, 14 aa, Homo sapiens
  Table 4 sequence identifier: Q12996_C646
  MOD_RES (2)..(2): May or may not be conjugated to a chemical probe
RCKIPNTVEEAVRI

SEQ ID NO: 8016 - protein, 28 aa, Homo sapiens
  Table 4 sequence identifier: P15170_C276
  MOD_RES (7)..(7): May or may not be conjugated to a chemical probe
KEQSDFCPWYIGLPFIPYLDNLPNFNRS

SEQ ID NO: 8017 - protein, 27 aa, Homo sapiens
  Table 4 sequence identifier: Q9BY32_C146
  MOD_RES (3)..(3): May or may not be conjugated to a chemical probe
RGCQDFGWDPCFQPDGYEQTYAEMPKA

SEQ ID NO: 8018 - protein, 18 aa, Homo sapiens
  Table 4 sequence identifier: Q9Y3Z3_C80
  MOD_RES (12)..(12): May or may not be conjugated to a chemical probe
RENEITGALLPCLDESRF

SEQ ID NO: 8019 - protein, 26 aa, Homo sapiens
  Table 4 sequence identifier: Q99590_C566
  MOD_RES (8)..(8): May or may not be conjugated to a chemical probe
KVYQPVSCPLSDLSENVESVVNEEKI

SEQ ID NO: 8020 - protein, 21 aa, Homo sapiens
  Table 4 sequence identifier: Q9BSQ5_C170
  MOD_RES (15)..(15): May or may not be conjugated to a chemical probe
KTAQDPGISPSQSLCAESSRG

SEQ ID NO: 8021 - protein, 11 aa, Homo sapiens
  Table 4 sequence identifier: P07737_C128
  MOD_RES (2)..(2): May or may not be conjugated to a chemical probe
KCYEMASHLRR

SEQ ID NO: 8022 - protein, 9 aa, Homo sapiens
  Table 4 sequence identifier: P45974_C195
  MOD_RES (5)..(5): May or may not be conjugated to a chemical probe
RIPPCGWKC

SEQ ID NO: 8023 - protein, 11 aa, Homo sapiens
  Table 4 sequence identifier: Q9H2U2_C44
  MOD_RES (5)..(5): May or may not be conjugated to a chemical probe
RGQPCSQNYRL

SEQ ID NO: 8024 - protein, 26 aa, Homo sapiens
  Table 4 sequence identifier: Q92530_C185
  MOD_RES (6)..(6): May or may not be conjugated to a chemical probe
RQPPWCDPLGPFVVGGEDLDPFGPRR

SEQ ID NO: 8025 - protein, 33 aa, Homo sapiens; identical to SEQ ID NO: 1427
  Table 4 sequence identifier: P26599_C23
  MOD_RES (10)..(10): May or may not be conjugated to a chemical probe

SEQ ID NO: 8026 - protein, 16 aa, Homo sapiens
  Table 4 sequence identifier: P57075_C435
  MOD_RES (11)..(11): May or may not be conjugated to a chemical probe
KYYRPDLNFPCSLPRR

SEQ ID NO: 8027 - protein, 23 aa, Homo sapiens
  Table 4 sequence identifier: P25208_C89
  MOD_RES (7)..(7): May or may not be conjugated to a chemical probe
KECVQECVSEFISFITSEASERC

SEQ ID NO: 8028 - protein, 30 aa, Homo sapiens
  Table 4 sequence identifier: Q8N6S5_C48
  MOD_RES (24)..(24): May or may not be conjugated to a chemical probe
RPSYSSFTQGDSWGEGEVDEEEGCDQVARD

SEQ ID NO: 8029 - protein, 21 aa, Homo sapiens
  Table 4 sequence identifier: Q96AP0_C406
  MOD_RES (11)..(11): May or may not be conjugated to a chemical probe
RSSSQPSPAICSAPATLTPRS

SEQ ID NO: 8030 - protein, 23 aa, Homo sapiens
  Table 4 sequence identifier: P25208_C85
  MOD_RES (3)..(3): May or may not be conjugated to a chemical probe
KECVQECVSEFISFITSEASERC

SEQ ID NO: 8031 - protein, 14 aa, Homo sapiens
  Table 4 sequence identifier: O14745_C206
  MOD_RES (9)..(9): May or may not be conjugated to a chemical probe
RIVEVNGVCMEGKQ

SEQ ID NO: 8032 - protein, 20 aa, Homo sapiens
  Table 4 sequence identifier: Q9H6S0_C363
  MOD_RES (6)..(6): May or may not be conjugated to a chemical probe
RYFGSCPVIYIQGRPFEVKE

SEQ ID NO: 8033 - protein, 27 aa, Homo sapiens
  Table 4 sequence identifier: Q9BY32_C154
  MOD_RES (11)..(11): May or may not be conjugated to a chemical probe
RGCQDFGWDPCFQPDGYEQTYAEMPKA

SEQ ID NO: 8034 - protein, 29 aa, Homo sapiens
  Table 4 sequence identifier: Q9UQ13_C306
  MOD_RES (2)..(2): May or may not be conjugated to a chemical probe
KCSALEELNLENNNISTLPESLLSSLVKL

SEQ ID NO: 8035 - protein, 25 aa, Homo sapiens
  Table 4 sequence identifier: P30876_C177
  MOD_RES (9)..(9): May or may not be conjugated to a chemical probe
RDLCELNECPLDPGGYFIINGSEKV

SEQ ID NO: 8036 - protein, 33 aa, Homo sapiens
  Table 4 sequence identifier: Q8TB24_C484
  MOD_RES (17)..(17): May or may not be conjugated to a chemical probe
RQLASTLPAPLENAELCTQAMALETPTPGPPRE

SEQ ID NO: 8037 - protein, 21 aa, Homo sapiens
  Table 4 sequence identifier: P37802_C38
  MOD_RES (19)..(19): May or may not be conjugated to a chemical probe
KQYDADLEQILIQWITTQCRK

SEQ ID NO: 8038 - protein, 15 aa, Homo sapiens
  Table 4 sequence identifier: P60174_C255
  MOD_RES (13)..(13): May or may not be conjugated to a chemical probe
RIIYGGSVTGATCKE

SEQ ID NO: 8039 - protein, 27 aa, Homo sapiens
  Table 4 sequence identifier: Q99832_C511
  MOD_RES (13)..(13): May or may not be conjugated to a chemical probe
RINALTAASEAACLIVSVDETIKNPRS

SEQ ID NO: 8040 - protein, 20 aa, Homo sapiens
  Table 4 sequence identifier: O75592_C3152
  MOD_RES (15)..(15): May or may not be conjugated to a chemical probe
KAASQNMIFPSPGSCAVLKK

SEQ ID NO: 8041 - protein, 25 aa, Homo sapiens
  Table 4 sequence identifier: Q9BSH5_C243
  MOD_RES (17)..(17): May or may not be conjugated to a chemical probe
KEHILPSLAHLLPALDCLEGSTPGL

SEQ ID NO: 8042 - protein, 11 aa, Homo sapiens
  Table 4 sequence identifier: Q13573_C250
  MOD_RES (5)..(5): May or may not be conjugated to a chemical probe
KIPPCISNWKN

SEQ ID NO: 8043 - protein, 20 aa, Homo sapiens
  Table 4 sequence identifier: P46777_C100
  MOD_RES (12)..(12): May or may not be conjugated to a chemical probe
KVGLTNYAAAYCTGLLLARR

SEQ ID NO: 8044 - protein, 11 aa, Homo sapiens
  Table 4 sequence identifier: O95571_C170
  MOD_RES (8)..(8): May or may not be conjugated to a chemical probe
RTDFQQGCAKT

SEQ ID NO: 8045 - protein, 13 aa, Homo sapiens
  Table 4 sequence identifier: Q92556_C726
  MOD_RES (12)..(12): May or may not be conjugated to a chemical probe
KEPSNYDFVYDCN

SEQ ID NO: 8046 - protein, 13 aa, Homo sapiens
  Table 4 sequence identifier: P84074_C185
  MOD_RES (5)..(5): May or may not be conjugated to a chemical probe
RLLQCDPSSASQF

SEQ ID NO: 8047 - protein, 13 aa, Homo sapiens
  Table 4 sequence identifier: P37235_C185
  MOD_RES (5)..(5): May or may not be conjugated to a chemical probe
RLLQCDPSSASQF

SEQ ID NO: 8048 - protein, 11 aa, Homo sapiens
  Table 4 sequence identifier: Q9BSJ8_C370
  MOD_RES (8)..(8): May or may not be conjugated to a chemical probe
RLGTQTFCSRV

SEQ ID NO: 8049 - protein, 13 aa, Homo sapiens
  Table 4 sequence identifier: P51610_C227
  MOD_RES (11)..(11): May or may not be conjugated to a chemical probe
KLVIYGGMSGCRL

SEQ ID NO: 8050 - protein, 13 aa, Homo sapiens
  Table 4 sequence identifier: P49753_C401
  MOD_RES (10)..(10): May or may not be conjugated to a chemical probe
KSEFYANEACKRL

SEQ ID NO: 8051 - protein, 12 aa, Homo sapiens
  Table 4 sequence identifier: J3QR44_C430
  MOD_RES (8)..(8): May or may not be conjugated to a chemical probe
RSVEEFQCLNRI

SEQ ID NO: 8052 - protein, 12 aa, Homo sapiens
  Table 4 sequence identifier: P21127_C440
  MOD_RES (8)..(8): May or may not be conjugated to a chemical probe
RSVEEFQCLNRI

SEQ ID NO: 8053 - protein, 20 aa, Homo sapiens
  Table 4 sequence identifier: O43149_C69
  MOD_RES (13)..(13): May or may not be conjugated to a chemical probe
REAAAALLPTPPCESLVSRH

SEQ ID NO: 8054 - protein, 21 aa, Homo sapiens
  Table 4 sequence identifier: Q9NZB2_C531
  MOD_RES (13)..(13): May or may not be conjugated to a chemical probe
KGSQMGTVQPIPCLLSMPTRN

SEQ ID NO: 8055 - protein, 21 aa, Homo sapiens
  Table 4 sequence identifier: Q6PJT7_C261
  MOD_RES (3)..(3): May or may not be conjugated to a chemical probe
RLCEPEVLNSLEETYSPFFRN

SEQ ID NO: 8056 - protein, 21 aa, Homo sapiens
  Table 4 sequence identifier: Q9Y613_C31
  MOD_RES (13)..(13): May or may not be conjugated to a chemical probe
RVQYLEDTDPFACANFPEPRR

SEQ ID NO: 8057 - protein, 17 aa, Homo sapiens
  Table 4 sequence identifier: Q9Y4F9_C596
  MOD_RES (15)..(15): May or may not be conjugated to a chemical probe
RLLSEGSVGGESEGCRS

SEQ ID NO: 8058 - protein, 9 aa, Homo sapiens
  Table 4 sequence identifier: Q93084_C614
  MOD_RES (2)..(2): May or may not be conjugated to a chemical probe
RCYQAGIRV

SEQ ID NO: 8059 - protein, 24 aa, Homo sapiens
  Table 4 sequence identifier: P78527_C25
  MOD_RES (12)..(12): May or may not be conjugated to a chemical probe
RLQETLSAADRCGAALAGHQLIRG

SEQ ID NO: 8060 - protein, 10 aa, Homo sapiens
  Table 4 sequence identifier: Q15027_C501
  MOD_RES (7)..(7): May or may not be conjugated to a chemical probe
KKPGPSCSRQ

SEQ ID NO: 8061 - protein, 12 aa, Homo sapiens
  Table 4 sequence identifier: Q9H2M9_C1336
  MOD_RES (7)..(7): May or may not be conjugated to a chemical probe
RLPPTLCTWLKA

SEQ ID NO: 8062 - protein, 13 aa, Homo sapiens
  Table 4 sequence identifier: P62857_C27
  MOD_RES (8)..(8): May or may not be conjugated to a chemical probe
RTGSQGQCTQVRV

SEQ ID NO: 8063 - protein, 15 aa, Homo sapiens
  Table 4 sequence identifier: P60981_C163
  MOD_RES (13)..(13): May or may not be conjugated to a chemical probe
KLGGSLIVAFEGCPV

SEQ ID NO: 8064 - protein, 40 aa, Homo sapiens
  Table 4 sequence identifier: Q96SK2_C158
  MOD_RES (6)..(6): May or may not be conjugated to a chemical probe
KFTTSCMTGYSPQLQGLSSGGSGSYSPGVTYSPVSGYNKL

SEQ ID NO: 8065 - protein, 11 aa, Homo sapiens
  Table 4 sequence identifier: P15153_C178
  MOD_RES (5)..(5): May or may not be conjugated to a chemical probe
RAVLCPQPTRQ

SEQ ID NO: 8066 - protein, 9 aa, Homo sapiens
  Table 4 sequence identifier: P37802_C124
  MOD_RES (5)..(5): May or may not be conjugated to a chemical probe
KNMACVQRT

SEQ ID NO: 8067 - protein, 10 aa, Homo sapiens
  Table 4 sequence identifier: Q63HN8_C3554
  MOD_RES (7)..(7): May or may not be conjugated to a chemical probe
RDQNESCTRN

SEQ ID NO: 8068 - protein, 22 aa, Homo sapiens
  Table 4 sequence identifier: O94915_C888
  MOD_RES (2)..(2): May or may not be conjugated to a chemical probe
RCSPPETLASTPDSGYSIDSKI

SEQ ID NO: 8069 - protein, 19 aa, Homo sapiens
  Table 4 sequence identifier: Q9UPR0_C90
  MOD_RES (14)..(14): May or may not be conjugated to a chemical probe
RGVALAPTPSAVVCTLPRE

SEQ ID NO: 8070 - protein, 21 aa, Homo sapiens
  Table 4 sequence identifier: Q96ME7_C324
  MOD_RES (18)..(18): May or may not be conjugated to a chemical probe
RSEHGPISFFPESGQPECLKE

SEQ ID NO: 8071 - protein, 43 aa, Homo sapiens; identical to SEQ ID NO: 455
  Table 4 sequence identifier: Q8IZ73_C431
  MOD_RES (10)..(10): May or may not be conjugated to a chemical probe

SEQ ID NO: 8072 - protein, 43 aa, Homo sapiens
  Table 4 sequence identifier: Q5SNT2_C498
  MOD_RES (18)..(18): May or may not be conjugated to a chemical probe
RSGEFPVSDYFSLLSGSCPSSPLPSPAPSVAGSVASSSGSLRH

SEQ ID NO: 8073 - protein, 24 aa, Homo sapiens
  Table 4 sequence identifier: Q14980_C1937
  MOD_RES (3)..(3): May or may not be conjugated to a chemical probe
KTCYPLESRPSLSLGTITDEEMKT

SEQ ID NO: 8074 - protein, 17 aa, Homo sapiens
  Table 4 sequence identifier: Q9BSD7_C184
  MOD_RES (11)..(11): May or may not be conjugated to a chemical probe
RNHLLPDIVTCVQSSRK

SEQ ID NO: 8075 - protein, 19 aa, Homo sapiens
  Table 4 sequence identifier: P56192_C441
  MOD_RES (3)..(3): May or may not be conjugated to a chemical probe
RSCPVVQSSQHLFLDLPKL

SEQ ID NO: 8076 - protein, 12 aa, Homo sapiens
  Table 4 sequence identifier: Q9BWW4_C80
  MOD_RES (4)..(4): May or may not be conjugated to a chemical probe
RDTCEHSSEAKA

SEQ ID NO: 8077 - protein, 15 aa, Homo sapiens
  Table 4 sequence identifier: P62834_C139
  MOD_RES (4)..(4): May or may not be conjugated to a chemical probe
RQWCNCAFLESSAKS

SEQ ID NO: 8078 - protein, 14 aa, Homo sapiens
  Table 4 sequence identifier: P49448_C172
  MOD_RES (2)..(2): May or may not be conjugated to a chemical probe
KCAVVDVPFGGAKA

SEQ ID NO: 8079 - protein, 14 aa, Homo sapiens
  Table 4 sequence identifier: P00367_C172
  MOD_RES (2)..(2): May or may not be conjugated to a chemical probe
KCAVVDVPFGGAKA

SEQ ID NO: 8080 - protein, 11 aa, Homo sapiens
  Table 4 sequence identifier: P23396_C134
  MOD_RES (3)..(3): May or may not be conjugated to a chemical probe
KGCEVVVSGKL

SEQ ID NO: 8081 - protein, 12 aa, Homo sapiens
  Table 4 sequence identifier: O75947_C101
  MOD_RES (3)..(3): May or may not be conjugated to a chemical probe
KSCAEWVSLSKA

SEQ ID NO: 8082 - protein, 14 aa, Homo sapiens
  Table 4 sequence identifier: Q9HC38_C171
  MOD_RES (7)..(7): May or may not be conjugated to a chemical probe
KSLNYWCNLLGMKI

SEQ ID NO: 8083 - protein, 18 aa, Homo sapiens
  Table 4 sequence identifier: O00233_C59
  MOD_RES (12)..(12): May or may not be conjugated to a chemical probe
KGIGMNEPLVDCEGYPRS

SEQ ID NO: 8084 - protein, 35 aa, Homo sapiens
  Table 4 sequence identifier: P14866_C472
  MOD_RES (25)..(25): May or may not be conjugated to a chemical probe
KLNVCVSKQPAIMPGQSYGLEDGSCSYKDFSESRN

SEQ ID NO: 8085 - protein, 14 aa, Homo sapiens
  Table 4 sequence identifier: Q04206_C105
  MOD_RES (10)..(10): May or may not be conjugated to a chemical probe
RDGFYEAELCPDRC

SEQ ID NO: 8086 - protein, 28 aa, Homo sapiens
  Table 4 sequence identifier: Q96FW1_C23
  MOD_RES (14)..(14): May or may not be conjugated to a chemical probe
KQEPLGSDSEGVNCLAYDEAIMAQQDRI

SEQ ID NO: 8087 - protein, 15 aa, Homo sapiens
  Table 4 sequence identifier: Q9UI30_C33
  MOD_RES (3)..(3): May or may not be conjugated to a chemical probe
RICPVEFNPNFVARM

SEQ ID NO: 8088 - protein, 31 aa, Homo sapiens; identical to SEQ ID NO: 3992
  Table 4 sequence identifier: O43815_C316
  MOD_RES (15)..(15): May or may not be conjugated to a chemical probe

SEQ ID NO: 8089 - protein, 52 aa, Homo sapiens
  Table 4 sequence identifier: P08047_C755
  MOD_RES (45)..(45): May or may not be conjugated to a chemical probe
KKGGPGVALSVGTLPLDSGAGSEGSGTATPSALITTNMVAMEAICPEGIARL

SEQ ID NO: 8090 - protein, 12 aa, Homo sapiens
  Table 4 sequence identifier: P60174_C104
  MOD_RES (9)..(9): May or may not be conjugated to a chemical probe
KIAVAAQNCYKV

SEQ ID NO: 8091 - protein, 21 aa, Homo sapiens
  Table 4 sequence identifier: O75362_C286
  MOD_RES (2)..(2): May or may not be conjugated to a chemical probe
RCIPQLDPFTTFQAWQLATKG

SEQ ID NO: 8092 - protein, 17 aa, Homo sapiens
  Table 4 sequence identifier: O60496_C36
  MOD_RES (12)..(12): May or may not be conjugated to a chemical probe
RFGASLYGGSDCALARL

SEQ ID NO: 8093 - protein, 29 aa, Homo sapiens
  Table 4 sequence identifier: P49792_C2791
  MOD_RES (27)..(27): May or may not be conjugated to a chemical probe
KSQTEEITSTTDSVYTGGTEVMVPSFCKS

SEQ ID NO: 8094 - protein, 26 aa, Homo sapiens
  Table 4 sequence identifier: Q13428_C38
  MOD_RES (2)..(2): May or may not be conjugated to a chemical probe
KCFLAQPVTLLDIYTHWQQTSELGRK

SEQ ID NO: 8095 - protein, 12 aa, Homo sapiens
  Table 4 sequence identifier: Q8TD47_C41
  MOD_RES (3)..(3): May or may not be conjugated to a chemical probe
RECLPLIVFLRN

SEQ ID NO: 8096 - protein, 12 aa, Homo sapiens
  Table 4 sequence identifier: P22090_C41
  MOD_RES (3)..(3): May or may not be conjugated to a chemical probe
RECLPLIVFLRN

SEQ ID NO: 8097 - protein, 28 aa, Homo sapiens
  Table 4 sequence identifier: Q8NDH3_C504
  MOD_RES (16)..(16): May or may not be conjugated to a chemical probe
RASEDPLLNLVSPLGCEVDVEEGDLGRD

SEQ ID NO: 8098 - protein, 20 aa, Homo sapiens
  Table 4 sequence identifier: Q96P11_C362
  MOD_RES (10)..(10): May or may not be conjugated to a chemical probe
RLVYSTCSLCQEENEDVVRD

SEQ ID NO: 8099 - protein, 42 aa, Homo sapiens; identical to SEQ ID NO: 4946
  Table 4 sequence identifier: Q8N3X1_C877
  MOD_RES (24)..(24): May or may not be conjugated to a chemical probe

SEQ ID NO: 8100 - protein, 14 aa, Homo sapiens
  Table 4 sequence identifier: Q92685_C21
  MOD_RES (12)..(12): May or may not be conjugated to a chemical probe
RSGSAAQAEGLCKQ

SEQ ID NO: 8101 - protein, 22 aa, Homo sapiens
  Table 4 sequence identifier: Q00013_C242
  MOD_RES (16)..(16): May or may not be conjugated to a chemical probe
RVASMAQSAPSEAPSCSPFGKK

SEQ ID NO: 8102 - protein, 23 aa, Homo sapiens
  Table 4 sequence identifier: Q9BTX1_C468
  MOD_RES (11)..(11): May or may not be conjugated to a chemical probe
RMAGIFDVNTCYGSPQSPQLIRR

SEQ ID NO: 8103 - protein, 21 aa, Homo sapiens
  Table 4 sequence identifier: Q96RU3_C609
  MOD_RES (17)..(17): May or may not be conjugated to a chemical probe
RNEDEEGYVPTSYVEVCLDKN

SEQ ID NO: 8104 - protein, 23 aa, Homo sapiens
  Table 4 sequence identifier: P31749_C310
  MOD_RES (4)..(4): May or may not be conjugated to a chemical probe
KTFCGTPEYLAPEVLEDNDYGRA

SEQ ID NO: 8105 - protein, 23 aa, Homo sapiens
  Table 4 sequence identifier: Q9Y243_C307
  MOD_RES (4)..(4): May or may not be conjugated to a chemical probe
KTFCGTPEYLAPEVLEDNDYGRA

SEQ ID NO: 8106 - protein, 23 aa, Homo sapiens
  Table 4 sequence identifier: P31751_C311
  MOD_RES (4)..(4): May or may not be conjugated to a chemical probe
KTFCGTPEYLAPEVLEDNDYGRA

SEQ ID NO: 8107 - protein, 20 aa, Homo sapiens
  Table 4 sequence identifier: O95248_C1374
  MOD_RES (7)..(7): May or may not be conjugated to a chemical probe
KACVPGCPAAEPSPASFLRS

SEQ ID NO: 8108 - protein, 24 aa, Homo sapiens
  Table 4 sequence identifier: O94953_C694
  MOD_RES (16)..(16): May or may not be conjugated to a chemical probe
RTEPYCAICTLFYPYCQALQTEKE

SEQ ID NO: 8109 - protein, 14 aa, Homo sapiens
  Table 4 sequence identifier: O95295_C66
  MOD_RES (12)..(12): May or may not be conjugated to a chemical probe
REQIDNLATELCRI

SEQ ID NO: 8110 - protein, 9 aa, Homo sapiens
  Table 4 sequence identifier: Q9Y4W2_C690
  MOD_RES (7)..(7): May or may not be conjugated to a chemical probe
RLEPSTCKT

SEQ ID NO: 8111 - protein, 19 aa, Homo sapiens
  Table 4 sequence identifier: P29375_C838
  MOD_RES (12)..(12): May or may not be conjugated to a chemical probe
KAFVQQLFSLPCVISQARQ

SEQ ID NO: 8112 - protein, 19 aa, Homo sapiens
  Table 4 sequence identifier: P52948_C1068
  MOD_RES (17)..(17): May or may not be conjugated to a chemical probe
KFTSGAFLSPSVSVQECRT

SEQ ID NO: 8113 - protein, 11 aa, Homo sapiens
  Table 4 sequence identifier: Q9Y5Y2_C269
  MOD_RES (9)..(9): May or may not be conjugated to a chemical probe
KILDATPACLP

SEQ ID NO: 8114 - protein, 19 aa, Homo sapiens
  Table 4 sequence identifier: P12814_C370
  MOD_RES (12)..(12): May or may not be conjugated to a chemical probe
RMVSDINNAWGCLEQVEKG

SEQ ID NO: 8115 - protein, 25 aa, Homo sapiens
  Table 4 sequence identifier: O75131_C506
  MOD_RES (7)..(7): May or may not be conjugated to a chemical probe
KEALAQCVLAEIPQQVVGYFNTYKL

SEQ ID NO: 8116 - protein, 30 aa, Homo sapiens; identical to SEQ ID NO: 1624
  Table 4 sequence identifier: Q7Z2W4_C38
  MOD_RES (19)..(19): May or may not be conjugated to a chemical probe

SEQ ID NO: 8117 - protein, 16 aa, Homo sapiens
  Table 4 sequence identifier: P51610_C1886
  MOD_RES (3)..(3): May or may not be conjugated to a chemical probe
KTCLPGFPGAPCAIKI

SEQ ID NO: 8118 - protein, 16 aa, Homo sapiens
  Table 4 sequence identifier: P51610_C1895
  MOD_RES (12)..(12): May or may not be conjugated to a chemical probe
KTCLPGFPGAPCAIKI

SEQ ID NO: 8119 - protein, 19 aa, Homo sapiens
  Table 4 sequence identifier: P40939_C322
  MOD_RES (14)..(14): May or may not be conjugated to a chemical probe
KTGIEQGSDAGYLCESQKF

SEQ ID NO: 8120 - protein, 16 aa, Homo sapiens
  Table 4 sequence identifier: Q63HN8_C3261
  MOD_RES (7)..(7): May or may not be conjugated to a chemical probe
KSILLNCATPDAVVRL

SEQ ID NO: 8121 - protein, 20 aa, Homo sapiens
  Table 4 sequence identifier: I3L3Q1_C264
  MOD_RES (5)..(5): May or may not be conjugated to a chemical probe
RLFPCADDLLETHSHFLARL

SEQ ID NO: 8122 - protein, 20 aa, Homo sapiens
  Table 4 sequence identifier: Q6ZSZ5_C306
  MOD_RES (5)..(5): May or may not be conjugated to a chemical probe
RLFPCADDLLETHSHFLARL

SEQ ID NO: 8123 - protein, 12 aa, Homo sapiens
  Table 4 sequence identifier: Q9BRJ7_C88
  MOD_RES (9)..(9): May or may not be conjugated to a chemical probe
RVLGLGLGCLRL

SEQ ID NO: 8124 - protein, 24 aa, Homo sapiens
  Table 4 sequence identifier: P52701_C615
  MOD_RES (6)..(6): May or may not be conjugated to a chemical probe
KSSLSCSLQEGLIPGSQFWDASKT

SEQ ID NO: 8125 - protein, 20 aa, Homo sapiens
  Table 4 sequence identifier: Q9Y4K1_C976
  MOD_RES (7)..(7): May or may not be conjugated to a chemical probe
KSNLPNCANSDTDFMGLFKS

SEQ ID NO: 8126 - protein, 10 aa, Homo sapiens
  Table 4 sequence identifier: Q15631_C225
  MOD_RES (7)..(7): May or may not be conjugated to a chemical probe
KETAAACVEK

SEQ ID NO: 8127 - protein, 21 aa, Homo sapiens
  Table 4 sequence identifier: Q9H9L4_C117
  MOD_RES (13)..(13): May or may not be conjugated to a chemical probe
KTNPGPVGETLLCQLSSYAKT

SEQ ID NO: 8128 - protein, 20 aa, Homo sapiens
  Table 4 sequence identifier: Q66K74_C435
  MOD_RES (7)..(7): May or may not be conjugated to a chemical probe
RVLFPGCTPPACLLDGLVRL

SEQ ID NO: 8129 - protein, 20 aa, Homo sapiens
  Table 4 sequence identifier: Q66K74_C440
  MOD_RES (12)..(12): May or may not be conjugated to a chemical probe
RVLFPGCTPPACLLDGLVRL

SEQ ID NO: 8130 - protein, 12 aa, Homo sapiens
  Table 4 sequence identifier: O75319_C325
  MOD_RES (7)..(7): May or may not be conjugated to a chemical probe
RLSYPACWEWTQ

SEQ ID NO: 8131 - protein, 8 aa, Homo sapiens
  Table 4 sequence identifier: Q02543_C16
  MOD_RES (2)..(2): May or may not be conjugated to a chemical probe
RCLPTPKC

SEQ ID NO: 8132 - protein, 27 aa, Homo sapiens
  Table 4 sequence identifier: Q96HA1_C307
  MOD_RES (24)..(24): May or may not be conjugated to a chemical probe
RSAIPEQIISSTLSSPSSNAPDPCAKE

SEQ ID NO: 8133 - protein, 27 aa, Homo sapiens
  Table 4 sequence identifier: Q6PJE2_C42
  MOD_RES (24)..(24): May or may not be conjugated to a chemical probe
RSAIPEQIISSTLSSPSSNAPDPCAKE

SEQ ID NO: 8134 - protein, 27 aa, Homo sapiens
  Table 4 sequence identifier: A8CG34_C284
  MOD_RES (24)..(24): May or may not be conjugated to a chemical probe
RSAIPEQIISSTLSSPSSNAPDPCAKE

SEQ ID NO: 8135 - protein, 28 aa, Homo sapiens
  Table 4 sequence identifier: O14523_C359
  MOD_RES (5)..(5): May or may not be conjugated to a chemical probe
RSSSCGDTELLGQATLPVGSPSRPLSRR

SEQ ID NO: 8136 - protein, 35 aa, Homo sapiens; identical to SEQ ID NO: 488
  Table 4 sequence identifier: Q99986_C50
  MOD_RES (13)..(13): May or may not be conjugated to a chemical probe

SEQ ID NO: 8137 - protein, 23 aa, Homo sapiens
  Table 4 sequence identifier: P62995_C118
  MOD_RES (8)..(8): May or may not be conjugated to a chemical probe
RANPDPNCCLGVFGLSLYTTERD

SEQ ID NO: 8138 - protein, 23 aa, Homo sapiens
  Table 4 sequence identifier: P62995_C119
  MOD_RES (9)..(9): May or may not be conjugated to a chemical probe
RANPDPNCCLGVFGLSLYTTERD

SEQ ID NO: 8139 - protein, 17 aa, Homo sapiens
  Table 4 sequence identifier: Q15050_C52
  MOD_RES (2)..(2): May or may not be conjugated to a chemical probe
RCAGPTPEAELQALARD

SEQ ID NO: 8140 - protein, 15 aa, Homo sapiens
  Table 4 sequence identifier: P08575_C608
  MOD_RES (3)..(3): May or may not be conjugated to a chemical probe
RSCNLDEQQELVERD

SEQ ID NO: 8141 - protein, 19 aa, Homo sapiens
  Table 4 sequence identifier: O43704_C22
  MOD_RES (10)..(10): May or may not be conjugated to a chemical probe
KLVHGYPMTCAFASNWEKI

SEQ ID NO: 8142 - protein, 26 aa, Homo sapiens
  Table 4 sequence identifier: P46060_C573
  MOD_RES (21)..(21): May or may not be conjugated to a chemical probe
KALAPLLLAFVTKPNSALESCSFARH

SEQ ID NO: 8143 - protein, 15 aa, Homo sapiens
  Table 4 sequence identifier: E9PMF8_C542
  MOD_RES (3)..(3): May or may not be conjugated to a chemical probe
RSCNLDEQQELVERD

SEQ ID NO: 8144 - protein, 52 aa, Homo sapiens; identical to SEQ ID NO: 5116
  Table 4 sequence identifier: Q13469_C386
  MOD_RES (26)..(26): May or may not be conjugated to a chemical probe

SEQ ID NO: 8145 - protein, 11 aa, Homo sapiens
  Table 4 sequence identifier: A6NHR9_C1710
  MOD_RES (3)..(3): May or may not be conjugated to a chemical probe
RSCTLPNYTKG

SEQ ID NO: 8146 - protein, 16 aa, Homo sapiens
  Table 4 sequence identifier: O43159_C451
  MOD_RES (12)..(12): May or may not be conjugated to a chemical probe
KAQLSGLQLQPCLYKR

SEQ ID NO: 8147 - protein, 38 aa, Homo sapiens; identical to SEQ ID NO: 1901
  Table 4 sequence identifier: Q99439_C274
  MOD_RES (3)..(3): May or may not be conjugated to a chemical probe

SEQ ID NO: 8148 - protein, 38 aa, Homo sapiens; identical to SEQ ID NO: 1901
  Table 4 sequence identifier: Q99439_C290
  MOD_RES (19)..(19): May or may not be conjugated to a chemical probe

SEQ ID NO: 8149 - protein, 18 aa, Homo sapiens
  Table 4 sequence identifier: Q06330_C397
  MOD_RES (2)..(2): May or may not be conjugated to a chemical probe
RCGESMLCVVPDISAFRE

SEQ ID NO: 8150 - protein, 22 aa, Homo sapiens
  Table 4 sequence identifier: O43264_C568
  MOD_RES (7)..(7): May or may not be conjugated to a chemical probe
RLAPILCDGTATFVDLVPGFRR

SEQ ID NO: 8151 - protein, 37 aa, Homo sapiens; identical to SEQ ID NO: 1206
  Table 4 sequence identifier: Q8N806_C35
  MOD_RES (26)..(26): May or may not be conjugated to a chemical probe

SEQ ID NO: 8152 - protein, 24 aa, Homo sapiens
  Table 4 sequence identifier: Q9UGV2_C359
  MOD_RES (15)..(15): May or may not be conjugated to a chemical probe
RSVTSNQSDGTQESCESPDVLDRH

SEQ ID NO: 8153 - protein, 11 aa, Homo sapiens
  Table 4 sequence identifier: P08758_C316
  MOD_RES (7)..(7): May or may not be conjugated to a chemical probe
KALLLLCGEDD

SEQ ID NO: 8154 - protein, 12 aa, Homo sapiens
  Table 4 sequence identifier: Q92878_C1296
  MOD_RES (6)..(6): May or may not be conjugated to a chemical probe
KNIDQCSEIVKC

SEQ ID NO: 8155 - protein, 33 aa, Homo sapiens; identical to SEQ ID NO: 1204
  Table 4 sequence identifier: B0V043_C112
  MOD_RES (22)..(22): May or may not be conjugated to a chemical probe

SEQ ID NO: 8156 - protein, 14 aa, Homo sapiens
  Table 4 sequence identifier: O94903_C261
  MOD_RES (8)..(8): May or may not be conjugated to a chemical probe
KKPTPDKCAADVKA

SEQ ID NO: 8157 - protein, 21 aa, Homo sapiens
  Table 4 sequence identifier: P53041_C11
  MOD_RES (4)..(4): May or may not be conjugated to a chemical probe
RTECAEPPRDEPPADGALKRA

SEQ ID NO: 8158 - protein, 35 aa, Homo sapiens
  Table 4 sequence identifier: Q92608_C1655
  MOD_RES (15)..(15): May or may not be conjugated to a chemical probe
RQMSIISLASMNSDCSTPSKPTSESFDLELASPKT

SEQ ID NO: 8159 - protein, 17 aa, Homo sapiens
  Table 4 sequence identifier: P35236_C62
  MOD_RES (10)..(10): May or may not be conjugated to a chemical probe
RSLGAVEPICSVNTPRE

SEQ ID NO: 8160 - protein, 14 aa, Homo sapiens
  Table 4 sequence identifier: Q86YV0_C896
  MOD_RES (7)..(7): May or may not be conjugated to a chemical probe
KLAELQCEVAALRE

SEQ ID NO: 8161 - protein, 15 aa, Homo sapiens
  Table 4 sequence identifier: Q6P1X6_C98
  MOD_RES (12)..(12): May or may not be conjugated to a chemical probe
RYEAAFPFLSPCGRE

SEQ ID NO: 8162 - protein, 11 aa, Homo sapiens
  Table 4 sequence identifier: Q8TDN6_C52
  MOD_RES (9)..(9): May or may not be conjugated to a chemical probe
RDRIPGPVCKG

SEQ ID NO: 8163 - protein, 12 aa, Homo sapiens
  Table 4 sequence identifier: Q15424_C225
  MOD_RES (10)..(10): May or may not be conjugated to a chemical probe
KILDILGETCKS

SEQ ID NO: 8164 - protein, 12 aa, Homo sapiens
  Table 4 sequence identifier: Q14151_C224
  MOD_RES (10)..(10): May or may not be conjugated to a chemical probe
KILDILGETCKS

SEQ ID NO: 8165 - protein, 18 aa, Homo sapiens
  Table 4 sequence identifier: Q8WXH0_C6161
  MOD_RES (5)..(5): May or may not be conjugated to a chemical probe
RTAACPNSSEVLYTSAKE

SEQ ID NO: 8166 - protein, 15 aa, Homo sapiens
  Table 4 sequence identifier: P45880_C13
  MOD_RES (4)..(4): May or may not be conjugated to a chemical probe
RPMCIPPSYADLGKA

SEQ ID NO: 8167 - protein, 36 aa, Homo sapiens
  Table 4 sequence identifier: Q92575_C144
  MOD_RES (29)..(29): May or may not be conjugated to a chemical probe
KSETSVANGSQSESSVSTPSASFEPNNTCENSQSRN

SEQ ID NO: 8168 - protein, 22 aa, Homo sapiens
  Table 4 sequence identifier: P07741_C83
  MOD_RES (17)..(17): May or may not be conjugated to a chemical probe
RGFLFGPSLAQELGLGCVLIRK

SEQ ID NO: 8169 - protein, 20 aa, Homo sapiens
  Table 4 sequence identifier: Q9BWH6_C1039
  MOD_RES (2)..(2): May or may not be conjugated to a chemical probe
RCGQGTLLAQACQDLPSIRN

SEQ ID NO: 8170 - protein, 32 aa, Homo sapiens; identical to SEQ ID NO: 2881
  Table 4 sequence identifier: Q96EP0_C551
  MOD_RES (27)..(27): May or may not be conjugated to a chemical probe

SEQ ID NO: 8171 - protein, 20 aa, Homo sapiens
  Table 4 sequence identifier: Q9BYG3_C237
  MOD_RES (12)..(12): May or may not be conjugated to a chemical probe
KTVDSQGPTPVCTPTFLERR

SEQ ID NO: 8172 - protein, 27 aa, Homo sapiens
  Table 4 sequence identifier: P17655_C39
  MOD_RES (4)..(4): May or may not be conjugated to a chemical probe
RNECLEAGTLFQDPSFPAIPSALGFKE

SEQ ID NO: 8173 - protein, 20 aa, Homo sapiens
  Table 4 sequence identifier: Q12789_C42
  MOD_RES (12)..(12): May or may not be conjugated to a chemical probe
RVPPFPLPLEPCTQEFLWRA

SEQ ID NO: 8174 - protein, 32 aa, Homo sapiens; identical to SEQ ID NO: 1818
  Table 4 sequence identifier: O00410_C1078
  MOD_RES (13)..(13): May or may not be conjugated to a chemical probe

SEQ ID NO: 8175 - protein, 12 aa, Homo sapiens
  Table 4 sequence identifier: Q15796_C70
  MOD_RES (8)..(8): May or may not be conjugated to a chemical probe
KAITTQNCNTKC

SEQ ID NO: 8176 - protein, 23 aa, Homo sapiens
  Table 4 sequence identifier: Q9H7D7_C656
  MOD_RES (18)..(18): May or may not be conjugated to a chemical probe
RIWGPAPFIDHQNIEEECSSMDS

SEQ ID NO: 8177 - protein, 17 aa, Homo sapiens
  Table 4 sequence identifier: O94804_C947
  MOD_RES (8)..(8): May or may not be conjugated to a chemical probe
KLSEEAECPNPSTPSKA

SEQ ID NO: 8178 - protein, 16 aa, Homo sapiens
  Table 4 sequence identifier: A6NHR9_C59
  MOD_RES (3)..(3): May or may not be conjugated to a chemical probe
RACVCQTLGISPEEKF

SEQ ID NO: 8179 - protein, 26 aa, Homo sapiens
  Table 4 sequence identifier: Q13501_C26
  MOD_RES (5)..(5): May or may not be conjugated to a chemical probe
RFSFCCSPEPEAEAEAAAGPGPCERL

SEQ ID NO: 8180 - protein, 26 aa, Homo sapiens
  Table 4 sequence identifier: Q13501_C27
  MOD_RES (6)..(6): May or may not be conjugated to a chemical probe
RFSFCCSPEPEAEAEAAAGPGPCERL

SEQ ID NO: 8181 - protein, 10 aa, Homo sapiens
  Table 4 sequence identifier: P04899_C352
  MOD_RES (7)..(7): May or may not be conjugated to a chemical probe
KNNLKDCGLF

SEQ ID NO: 8182 - protein, 30 aa, Homo sapiens; identical to SEQ ID NO: 1656
  Table 4 sequence identifier: P40222_C523
  MOD_RES (7)..(7): May or may not be conjugated to a chemical probe

SEQ ID NO: 8183 - protein, 23 aa, Homo sapiens
  Table 4 sequence identifier: Q6UUV9_C131
  MOD_RES (6)..(6): May or may not be conjugated to a chemical probe
RQADSCPYGTMYLSPPADTSWRR

SEQ ID NO: 8184 - protein, 11 aa, Homo sapiens
  Table 4 sequence identifier: O75643_C428
  MOD_RES (2)..(2): May or may not be conjugated to a chemical probe
RCQLPDGSFRR

SEQ ID NO: 8185 - protein, 18 aa, Homo sapiens
  Table 4 sequence identifier: P29590_C338
  MOD_RES (2)..(2): May or may not be conjugated to a chemical probe
KCYASDQEVLDMHGFLRQ

SEQ ID NO: 8186 - protein, 13 aa, Homo sapiens
  Table 4 sequence identifier: Q32MZ4_C14
  MOD_RES (5)..(5): May or may not be conjugated to a chemical probe
REIDCLSPEAQKL

SEQ ID NO: 8187 - protein, 19 aa, Homo sapiens
  Table 4 sequence identifier: P07814_C1487
  MOD_RES (11)..(11): May or may not be conjugated to a chemical probe
KSLCIPFKPLCELQPGAKC

SEQ ID NO: 8188 - protein, 15 aa, Homo sapiens
  Table 4 sequence identifier: Q08999_C368
  MOD_RES (2)..(2): May or may not be conjugated to a chemical probe
RCLNAGSGTETAERV

SEQ ID NO: 8189 - protein, 41 aa, Homo sapiens; identical to SEQ ID NO: 2558
  Table 4 sequence identifier: Q6IA86_C475
  MOD_RES (8)..(8): May or may not be conjugated to a chemical probe

SEQ ID NO: 8190 - protein, 16 aa, Homo sapiens
  Table 4 sequence identifier: A6NHR9_C61
  MOD_RES (5)..(5): May or may not be conjugated to a chemical probe
RACVCQTLGISPEEKF

SEQ ID NO: 8191 - protein, 18 aa, Homo sapiens
  Table 4 sequence identifier: P35611_C525
  MOD_RES (11)..(11): May or may not be conjugated to a chemical probe
KTAGPQSQVLCGVVMDRS

SEQ ID NO: 8192 - protein, 23 aa, Homo sapiens
  Table 4 sequence identifier: P52701_C88
  MOD_RES (11)..(11): May or may not be conjugated to a chemical probe
RSVAPAAPTSCDFSPGDLVWAKM

SEQ ID NO: 8193 - protein, 16 aa, Homo sapiens
  Table 4 sequence identifier: Q14137_C108
  MOD_RES (13)..(13): May or may not be conjugated to a chemical probe
KTTEEQVQASTPCPRT

SEQ ID NO: 8194 - protein, 20 aa, Homo sapiens
  Table 4 sequence identifier: Q12802_C1232
  MOD_RES (8)..(8): May or may not be conjugated to a chemical probe
RSTPSLPCMVSAQDAPLPKG

SEQ ID NO: 8195 - protein, 31 aa, Homo sapiens
  Table 4 sequence identifier: Q92800_C423
  MOD_RES (10)..(10): May or may not be conjugated to a chemical probe
KASPAPPQLCVVEAPSEPVEWTGAEESLFRV

SEQ ID NO: 8196 - protein, 11 aa, Homo sapiens
  Table 4 sequence identifier: Q8N9N8_C89
  MOD_RES (9)..(9): May or may not be conjugated to a chemical probe
KAEISFVLCKD

SEQ ID NO: 8197 - protein, 26 aa, Homo sapiens
  Table 4 sequence identifier: Q13813_C2233
  MOD_RES (9)..(9): May or may not be conjugated to a chemical probe
RTYLLDGSCMVEESGTLESQLEATKR

SEQ ID NO: 8198 - protein, 19 aa, Homo sapiens
  Table 4 sequence identifier: Q96EK4_C48
  MOD_RES (7)..(7): May or may not be conjugated to a chemical probe
RAGVSGCFSTFQPTTGHRL

SEQ ID NO: 8199 - protein, 26 aa, Homo sapiens
  Table 4 sequence identifier: O95267_C713
  MOD_RES (18)..(18): May or may not be conjugated to a chemical probe
RKTAQDTLYVLPSPTSPCPSPVLVRK

SEQ ID NO: 8200 - protein, 10 aa, Homo sapiens
  Table 4 sequence identifier: P62851_C59
  MOD_RES (8)..(8): May or may not be conjugated to a chemical probe
KATYDKLCKE

SEQ ID NO: 8201 - protein, 15 aa, Homo sapiens
  Table 4 sequence identifier: O60551_C104
  MOD_RES (9)..(9): May or may not be conjugated to a chemical probe
RAMELLSACQGPARN

SEQ ID NO: 8202 - protein, 25 aa, Homo sapiens
  Table 4 sequence identifier: Q9Y228_C135
  MOD_RES (23)..(23): May or may not be conjugated to a chemical probe
REQVTGTSSEVFPAQHPPPSGICRD

SEQ ID NO: 8203 - protein, 30 aa, Homo sapiens
  Table 4 sequence identifier: I3L1I5_C189
  MOD_RES (26)..(26): May or may not be conjugated to a chemical probe
RSPEISPGLEVPTPPVQGLEPPVLECMEKD

SEQ ID NO: 8204 - protein, 33 aa, Homo sapiens; identical to SEQ ID NO: 2906
  Table 4 sequence identifier: P08047_C68
  MOD_RES (30)..(30): May or may not be conjugated to a chemical probe

SEQ ID NO: 8205 - protein, 21 aa, Homo sapiens
  Table 4 sequence identifier: E7ETI0_C21
  MOD_RES (9)..(9): May or may not be conjugated to a chemical probe
RATLQAALCLENFSSQVVERH

SEQ ID NO: 8206 - protein, 21 aa, Homo sapiens
  Table 4 sequence identifier: P59998_C21
  MOD_RES (9)..(9): May or may not be conjugated to a chemical probe
RATLQAALCLENFSSQVVERH

SEQ ID NO: 8207 - protein, 21 aa, Homo sapiens
  Table 4 sequence identifier: Q7KZ85_C336
  MOD_RES (15)..(15): May or may not be conjugated to a chemical probe
RNAFATPTISLQESCDYLDRG

SEQ ID NO: 8208 - protein, 12 aa, Homo sapiens
  Table 4 sequence identifier: Q9HB58_C461
  MOD_RES (9)..(9): May or may not be conjugated to a chemical probe
KSDTVDFHCSKL

SEQ ID NO: 8209 - protein, 26 aa, Homo sapiens
  Table 4 sequence identifier: B0I1T2_C793
  MOD_RES (24)..(24): May or may not be conjugated to a chemical probe
RDLVWPLPPAVLQPFQDTCHALFCRW

SEQ ID NO: 8210 - protein, 25 aa, Homo sapiens
  Table 4 sequence identifier: Q99497_C106
  MOD_RES (8)..(8): May or may not be conjugated to a chemical probe
KGLIAAICAGPTALLAHEIGFGSKV

SEQ ID NO: 8211 - protein, 13 aa, Homo sapiens
  Table 4 sequence identifier: Q9HB19_C191
  MOD_RES (11)..(11): May or may not be conjugated to a chemical probe
RSQSYIPTSGCRA

SEQ ID NO: 8212 - protein, 26 aa, Homo sapiens
  Table 4 sequence identifier: B0I1T2_C788
  MOD_RES (19)..(19): May or may not be conjugated to a chemical probe
RDLVWPLPPAVLQPFQDTCHALFCRW

SEQ ID NO: 8213 - protein, 13 aa, Homo sapiens
  Table 4 sequence identifier: Q9NWY4_C17
  MOD_RES (10)..(10): May or may not be conjugated to a chemical probe
RRPGGEGPQCEKT

SEQ ID NO: 8214 - protein, 30 aa, Homo sapiens
  Table 4 sequence identifier: Q9H4L4_C243
  MOD_RES (13)..(13): May or may not be conjugated to a chemical probe
KSPLDPDSGLLSCTLPNGFGGQSGPEGERS

SEQ ID NO: 8215 - protein, 17 aa, Homo sapiens
  Table 4 sequence identifier: A0AVT1_C347
  MOD_RES (7)..(7): May or may not be conjugated to a chemical probe
RKPNVGCQQDSEELLKL

SEQ ID NO: 8216 - protein, 26 aa, Homo sapiens
  Table 4 sequence identifier: P23497_C238
  MOD_RES (22)..(22): May or may not be conjugated to a chemical probe
KRKDTTSDKDDSLGSQQTNEQCAQKA

SEQ ID NO: 8217 - protein, 34 aa, Homo sapiens
  Table 4 sequence identifier: Q9NU22_C4041
  MOD_RES (19)..(19): May or may not be conjugated to a chemical probe
RETLLAQPAAGQATIPEWCQGAAPSGLEGELLRR

SEQ ID NO: 8218 - protein, 12 aa, Homo sapiens
  Table 4 sequence identifier: Q92835_C506
  MOD_RES (6)..(6): May or may not be conjugated to a chemical probe
RISHICTDNVKT

SEQ ID NO: 8219 - protein, 19 aa, Homo sapiens
  Table 4 sequence identifier: Q66GS9_C316
  MOD_RES (3)..(3): May or may not be conjugated to a chemical probe
KLCQELTEIDQLAQQLERH

SEQ ID NO: 8220 - protein, 25 aa, Homo sapiens
  Table 4 sequence identifier: P48739_C13
  MOD_RES (6)..(6): May or may not be conjugated to a chemical probe
RVVLPCSVQEYQVGQLYSVAEASKN

SEQ ID NO: 8221 - protein, 9 aa, Homo sapiens
  Table 4 sequence identifier: P35914_C323
  MOD_RES (7)..(7): May or may not be conjugated to a chemical probe
KVAQATCKL

SEQ ID NO: 8222 - protein, 17 aa, Homo sapiens
  Table 4 sequence identifier: Q5JSL3_C1190
  MOD_RES (7)..(7): May or may not be conjugated to a chemical probe
RDTLYSCAAMPNSASRD

SEQ ID NO: 8223 - protein, 18 aa, Homo sapiens
  Table 4 sequence identifier: Q96JY6_C160
  MOD_RES (8)..(8): May or may not be conjugated to a chemical probe
RSFQSLACSPGLPAADRL

SEQ ID NO: 8224 - protein, 27 aa, Homo sapiens
  Table 4 sequence identifier: Q7Z5K2_C94
  MOD_RES (2)..(2): May or may not be conjugated to a chemical probe
KCSSYSESSEAAQLEEVTSVLEANSKI

SEQ ID NO: 8225 - protein, 20 aa, Homo sapiens
  Table 4 sequence identifier: Q00653_C57
  MOD_RES (4)..(4): May or may not be conjugated to a chemical probe
RYGCEGPSHGGLPGASSEKG

SEQ ID NO: 8226 - protein, 17 aa, Homo sapiens
  Table 4 sequence identifier: Q8TC07_C686
  MOD_RES (15)..(15): May or may not be conjugated to a chemical probe
RNDSPTQIPVSSDVCRL

SEQ ID NO: 8227 - protein, 19 aa, Homo sapiens
  Table 4 sequence identifier: Q8N1F7_C422
  MOD_RES (6)..(6): May or may not be conjugated to a chemical probe
KLNQVCFDDDGTSSPQDRL

SEQ ID NO: 8228 - protein, 19 aa, Homo sapiens
  Table 4 sequence identifier: P57678_C210
  MOD_RES (7)..(7): May or may not be conjugated to a chemical probe
RSDPDACPTMPLLAMLLRG

SEQ ID NO: 8229 - protein, 10 aa, Homo sapiens
  Table 4 sequence identifier: Q7Z5R6_C401
  MOD_RES (5)..(5): May or may not be conjugated to a chemical probe
KYLCCDDTRT

SEQ ID NO: 8230 - protein, 19 aa, Homo sapiens
  Table 4 sequence identifier: Q9NX24_C18
  MOD_RES (14)..(14): May or may not be conjugated to a chemical probe
KADPDGPEAQAEACSGERT

SEQ ID NO: 8231 - protein, 14 aa, Homo sapiens
  Table 4 sequence identifier: P55265_C622
  MOD_RES (10)..(10): May or may not be conjugated to a chemical probe
KSPVTTLLECMHKL

SEQ ID NO: 8232 - protein, 28 aa, Homo sapiens
  Table 4 sequence identifier: Q8WVV9_C464
  MOD_RES (19)..(19): May or may not be conjugated to a chemical probe
KNIIQPPSCVLHYYNVPLCVTEETFTKL

SEQ ID NO: 8233 - protein, 11 aa, Homo sapiens
  Table 4 sequence identifier: Q99832_C364
  MOD_RES (8)..(8): May or may not be conjugated to a chemical probe
RYNFFTGCPKA

SEQ ID NO: 8234 - protein, 30 aa, Homo sapiens; identical to SEQ ID NO: 2671
  Table 4 sequence identifier: P63244_C286
  MOD_RES (7)..(7): May or may not be conjugated to a chemical probe

SEQ ID NO: 8235 - protein, 16 aa, Homo sapiens
  Table 4 sequence identifier: Q13427_C310
  MOD_RES (3)..(3): May or may not be conjugated to a chemical probe
RECNPPNSQPASYQRR

SEQ ID NO: 8236 - protein, 19 aa, Homo sapiens
  Table 4 sequence identifier: P48147_C25
  MOD_RES (3)..(3): May or may not be conjugated to a chemical probe
KICDPYAWLEDPDSEQTKA

SEQ ID NO: 8237 - protein, 23 aa, Homo sapiens
  Table 4 sequence identifier: Q9UJZ1_C167
  MOD_RES (18)..(18): May or may not be conjugated to a chemical probe
RESLNASIVDAINQAADCWGIRC

SEQ ID NO: 8238 - protein, 9 aa, Homo sapiens
  Table 4 sequence identifier: O75369_C26
  MOD_RES (3)..(3): May or may not be conjugated to a chemical probe
RWCNEHLKC

SEQ ID NO: 8239 - protein, 9 aa, Homo sapiens
  Table 4 sequence identifier: P21333_C53
  MOD_RES (3)..(3): May or may not be conjugated to a chemical probe
RWCNEHLKC

SEQ ID NO: 8240 - protein, 21 aa, Homo sapiens
  Table 4 sequence identifier: Q92974_C335
  MOD_RES (19)..(19): May or may not be conjugated to a chemical probe
RLGDLLISQFSGPSAEQMCKT

SEQ ID NO: 8241 - protein, 22 aa, Homo sapiens
  Table 4 sequence identifier: Q92835_C1050
  MOD_RES (7)..(7): May or may not be conjugated to a chemical probe
RKEPPPCPEPGILSPSIVLTKA

SEQ ID NO: 8242 - protein, 13 aa, Homo sapiens
  Table 4 sequence identifier: Q4G0F5_C334
  MOD_RES (11)..(11): May or may not be conjugated to a chemical probe
RTPSQLSDNNCRQ

SEQ ID NO: 8243 - protein, 11 aa, Homo sapiens
  Table 4 sequence identifier: P17844_C234
  MOD_RES (8)..(8): May or may not be conjugated to a chemical probe
RLIDFLECGKT

SEQ ID NO: 8244 - protein, 13 aa, Homo sapiens
  Table 4 sequence identifier: Q9BSD7_C101
  MOD_RES (5)..(5): May or may not be conjugated to a chemical probe
RNADCSSGPGQRV

SEQ ID NO: 8245 - protein, 31 aa, Homo sapiens; identical to SEQ ID NO: 1868
  Table 4 sequence identifier: Q92619_C1020
  MOD_RES (29)..(29): May or may not be conjugated to a chemical probe

SEQ ID NO: 8246 - protein, 16 aa, Homo sapiens
  Table 4 sequence identifier: Q14790_C360
  MOD_RES (8)..(8): May or may not be conjugated to a chemical probe
KVFFIQACQGDNYQKG

SEQ ID NO: 8247 - protein, 40 aa, Homo sapiens; identical to SEQ ID NO: 234
  Table 4 sequence identifier: O15067_C1285
  MOD_RES (34)..(34): May or may not be conjugated to a chemical probe

SEQ ID NO: 8248 - protein, 40 aa, Homo sapiens; identical to SEQ ID NO: 234
  Table 4 sequence identifier: O15067_C1287
  MOD_RES (36)..(36): May or may not be conjugated to a chemical probe

SEQ ID NO: 8249 - protein, 20 aa, Homo sapiens
  Table 4 sequence identifier: O60880_C124
  MOD_RES (16)..(16): May or may not be conjugated to a chemical probe
RSTQGTTGIREDPDVCLKAP

SEQ ID NO: 8250 - protein, 15 aa, Homo sapiens
  Table 4 sequence identifier: Q92888_C537
  MOD_RES (3)..(3): May or may not be conjugated to a chemical probe
RFCAFVQEAESRPRC

SEQ ID NO: 8251 - protein, 28 aa, Homo sapiens
  Table 4 sequence identifier: O14879_C343
  MOD_RES (20)..(20): May or may not be conjugated to a chemical probe
KGLNPLNAYSDLAEFLETECYQTPFNKE

SEQ ID NO: 8252 - protein, 21 aa, Homo sapiens
  Table 4 sequence identifier: Q93052_C364
  MOD_RES (13)..(13): May or may not be conjugated to a chemical probe
KKTYITDPVSAPCAPPLQPKG

SEQ ID NO: 8253 - protein, 15 aa, Homo sapiens
  Table 4 sequence identifier: P22695_C192
  MOD_RES (10)..(10): May or may not be conjugated to a chemical probe
RNALANPLYCPDYRI

SEQ ID NO: 8254 - protein, 17 aa, Homo sapiens
  Table 4 sequence identifier: P10398_C597
  MOD_RES (10)..(10): May or may not be conjugated to a chemical probe
RTQADELPACLLSAARL

SEQ ID NO: 8255 - protein, 15 aa, Homo sapiens
  Table 4 sequence identifier: P78347_C215
  MOD_RES (10)..(10): May or may not be conjugated to a chemical probe
RSILSPGGSCGPIKV

SEQ ID NO: 8256 - protein, 21 aa, Homo sapiens
  Table 4 sequence identifier: P08575_C1259
  MOD_RES (6)..(6): May or may not be conjugated to a chemical probe
KQDANCVNPLGAPEKLPEAKE

SEQ ID NO: 8257 - protein, 15 aa, Homo sapiens
  Table 4 sequence identifier: Q9UHB9_C562
  MOD_RES (6)..(6): May or may not be conjugated to a chemical probe
RFETFCLDPSLVTKQ

SEQ ID NO: 8258 - protein, 29 aa, Homo sapiens
  Table 4 sequence identifier: P40121_C290
  MOD_RES (26)..(26): May or may not be conjugated to a chemical probe
KVADSSPFALELLISDDCFVLDNGLCGKI

SEQ ID NO: 8259 - protein, 12 aa, Homo sapiens
  Table 4 sequence identifier: P36578_C250
  MOD_RES (3)..(3): May or may not be conjugated to a chemical probe
RFCIWTESAFRK

SEQ ID NO: 8260 - protein, 19 aa, Homo sapiens
  Table 4 sequence identifier: A9UHW6_C49
  MOD_RES (14)..(14): May or may not be conjugated to a chemical probe
KVANVIVDHSLQDCVFSKE

SEQ ID NO: 8261 - protein, 16 aa, Homo sapiens
  Table 4 sequence identifier: Q9Y3B4_C83
  MOD_RES (13)..(13): May or may not be conjugated to a chemical probe
KNACDHLSGFNVCNRY

SEQ ID NO: 8262 - protein, 49 aa, Homo sapiens; identical to SEQ ID NO: 3484
  Table 4 sequence identifier: Q93008_C1212
  MOD_RES (45)..(45): May or may not be conjugated to a chemical probe

SEQ ID NO: 8263 - protein, 12 aa, Homo sapiens
  Table 4 sequence identifier: P11171_C179
  MOD_RES (9)..(9): May or may not be conjugated to a chemical probe
KEGEGLEECSKI

SEQ ID NO: 8264 - protein, 17 aa, Homo sapiens
  Table 4 sequence identifier: Q9BZS1_C169
  MOD_RES (7)..(7): May or may not be conjugated to a chemical probe
REPALLCTFPNPSAPRK

SEQ ID NO: 8265 - protein, 20 aa, Homo sapiens
  Table 4 sequence identifier: Q13469_C256
  MOD_RES (4)..(4): May or may not be conjugated to a chemical probe
RHSCAEALVALPPGASPQRS

SEQ ID NO: 8266 - protein, 25 aa, Homo sapiens
  Table 4 sequence identifier: Q9BWW8_C25
  MOD_RES (9)..(9): May or may not be conjugated to a chemical probe
RDEDDAPLCEDVELQDGDLSPEEKI

SEQ ID NO: 8267 - protein, 48 aa, Homo sapiens; identical to SEQ ID NO: 1589
  Table 4 sequence identifier: Q15366_C217
  MOD_RES (19)..(19): May or may not be conjugated to a chemical probe

SEQ ID NO: 8268 - protein, 28 aa, Homo sapiens
  Table 4 sequence identifier: P13796_C101
  MOD_RES (5)..(5): May or may not be conjugated to a chemical probe
KEGICAIGGTSEQSSVGTQHSYSEEEKY

SEQ ID NO: 8269 - protein, 14 aa, Homo sapiens
  Table 4 sequence identifier: Q16851_C123
  MOD_RES (12)..(12): May or may not be conjugated to a chemical probe
KLNGGLGTSMGCKG

SEQ ID NO: 8270 - protein, 14 aa, Homo sapiens
  Table 4 sequence identifier: P53602_C108
  MOD_RES (12)..(12): May or may not be conjugated to a chemical probe
RDGDPLPSSLSCKV

SEQ ID NO: 8271 - protein, 26 aa, Homo sapiens
  Table 4 sequence identifier: Q9NR30_C378
  MOD_RES (16)..(16): May or may not be conjugated to a chemical probe
KDSEDNPQTLLFSATCPHWVFNVAKK

SEQ ID NO: 8272 - protein, 12 aa, Homo sapiens
  Table 4 sequence identifier: P13727_C201
  MOD_RES (9)..(9): May or may not be conjugated to a chemical probe
RGGHCVALCTRG

SEQ ID NO: 8273 - protein, 17 aa, Homo sapiens
  Table 4 sequence identifier: O14867_C646
  MOD_RES (7)..(7): May or may not be conjugated to a chemical probe
KYSAADCPLSFLISEKD

SEQ ID NO: 8274 - protein, 19 aa, Homo sapiens
  Table 4 sequence identifier: O43772_C283
  MOD_RES (9)..(9): May or may not be conjugated to a chemical probe
RAFPANAACFLGFEVAMKF

SEQ ID NO: 8275 - protein, 17 aa, Homo sapiens
  Table 4 sequence identifier: Q9Y3F4_C305
  MOD_RES (2)..(2): May or may not be conjugated to a chemical probe
KCVLPEEDSGELAKPKI

SEQ ID NO: 8276 - protein, 21 aa, Homo sapiens
  Table 4 sequence identifier: Q12802_C1677
  MOD_RES (10)..(10): May or may not be conjugated to a chemical probe
RSKQQGFNYCTSAISSPLTKS

SEQ ID NO: 8277 - protein, 17 aa, Homo sapiens
  Table 4 sequence identifier: Q9BSU1_C222
  MOD_RES (7)..(7): May or may not be conjugated to a chemical probe
RLLAAGCGPGLLADAKM

SEQ ID NO: 8278 - protein, 26 aa, Homo sapiens
  Table 4 sequence identifier: P78362_C320
  MOD_RES (21)..(21): May or may not be conjugated to a chemical probe
KIIEENITSAAPSNDQDGEYCPEVKL

SEQ ID NO: 8279 - protein, 11 aa, Homo sapiens
  Table 4 sequence identifier: Q9NZJ7_C385
  MOD_RES (7)..(7): May or may not be conjugated to a chemical probe
RVSSGSCFALE

SEQ ID NO: 8280 - protein, 15 aa, Homo sapiens
  Table 4 sequence identifier: P51692_C688
  MOD_RES (8)..(8): May or may not be conjugated to a chemical probe
KYYTPVPCESATAKA

SEQ ID NO: 8281 - protein, 21 aa, Homo sapiens
  Table 4 sequence identifier: Q04637_C662
  MOD_RES (7)..(7): May or may not be conjugated to a chemical probe
RLQGINCGPDFTPSFANLGRT

SEQ ID NO: 8282 - protein, 8 aa, Homo sapiens
  Table 4 sequence identifier: Q08AF3_C369
  MOD_RES (5)..(5): May or may not be conjugated to a chemical probe
KNSECLKE

SEQ ID NO: 8283 - protein, 20 aa, Homo sapiens
  Table 4 sequence identifier: Q9NZB2_C919
  MOD_RES (9)..(9): May or may not be conjugated to a chemical probe
RVAAASGHCGAFSGSDSSRT

SEQ ID NO: 8284 - protein, 13 aa, Homo sapiens
  Table 4 sequence identifier: O60684_C238
  MOD_RES (11)..(11): May or may not be conjugated to a chemical probe
RNAVWALSNLCRG

SEQ ID NO: 8285 - protein, 13 aa, Homo sapiens
  Table 4 sequence identifier: O15131_C238
  MOD_RES (11)..(11): May or may not be conjugated to a chemical probe
RNAVWALSNLCRG

SEQ ID NO: 8286 - protein, 13 aa, Homo sapiens
  Table 4 sequence identifier: P52294_C240
  MOD_RES (11)..(11): May or may not be conjugated to a chemical probe
RNAVWALSNLCRG

SEQ ID NO: 8287 - protein, 22 aa, Homo sapiens
  Table 4 sequence identifier: Q8ND71_C214
  MOD_RES (5)..(5): May or may not be conjugated to a chemical probe
RFQDCVNEAASQEGDKPQGPRE

SEQ ID NO: 8288 - protein, 14 aa, Homo sapiens
  Table 4 sequence identifier: P35658_C728
  MOD_RES (3)..(3): May or may not be conjugated to a chemical probe
KACFQVGTSEEMKM

SEQ ID NO: 8289 - protein, 18 aa, Homo sapiens
  Table 4 sequence identifier: Q32MZ4_C644
  MOD_RES (12)..(12): May or may not be conjugated to a chemical probe
KIAAESSENVDCPENPKI

SEQ ID NO: 8290 - protein, 38 aa, Homo sapiens
  Table 4 sequence identifier: Q8TCU6_C1116
  MOD_RES (15)..(15): May or may not be conjugated to a chemical probe
RLLSTITEPTSGGSCDASLAEEASSLPLVSEESEMDRS

SEQ ID NO: 8291 - protein, 13 aa, Homo sapiens
  Table 4 sequence identifier: Q96I24_C460
  MOD_RES (5)..(5): May or may not be conjugated to a chemical probe
RSSGCFPNMAAKV

SEQ ID NO: 8292 - protein, 21 aa, Homo sapiens
  Table 4 sequence identifier: Q6KC79_C1066
  MOD_RES (18)..(18): May or may not be conjugated to a chemical probe
KELPPELLAEIESTMPLCERV

SEQ ID NO: 8293 - protein, 13 aa, Homo sapiens
  Table 4 sequence identifier: Q03519_C353
  MOD_RES (11)..(11): May or may not be conjugated to a chemical probe
RSFGAEEHEVCRY

SEQ ID NO: 8294 - protein, 26 aa, Homo sapiens
  Table 4 sequence identifier: Q7Z3K3_C547
  MOD_RES (11)..(11): May or may not be conjugated to a chemical probe
RQFSTPFQLQCHLENVHSPYESTTKC

SEQ ID NO: 8295 - protein, 16 aa, Homo sapiens
  Table 4 sequence identifier: Q7L8W6_C88
  MOD_RES (2)..(2): May or may not be conjugated to a chemical probe
KCEGDEVEDLYELLKL

SEQ ID NO: 8296 - protein, 21 aa, Homo sapiens
  Table 4 sequence identifier: Q9Y2Z0_C62
  MOD_RES (12)..(12): May or may not be conjugated to a chemical probe
RAYCHILLGNYCVAVADAKKS

SEQ ID NO: 8297 - protein, 16 aa, Homo sapiens
  Table 4 sequence identifier: P34932_C376
  MOD_RES (3)..(3): May or may not be conjugated to a chemical probe
RGCALQCAILSPAFKV

SEQ ID NO: 8298 - protein, 16 aa, Homo sapiens
  Table 4 sequence identifier: Q92598_C376
  MOD_RES (3)..(3): May or may not be conjugated to a chemical probe
RGCALQCAILSPAFKV

SEQ ID NO: 8299 - protein, 13 aa, Homo sapiens
  Table 4 sequence identifier: P17844_C221
  MOD_RES (6)..(6): May or may not be conjugated to a chemical probe
RGVEICIATPGRL

SEQ ID NO: 8300 - protein, 13 aa, Homo sapiens
  Table 4 sequence identifier: Q92841_C298
  MOD_RES (6)..(6): May or may not be conjugated to a chemical probe
RGVEICIATPGRL

SEQ ID NO: 8301 - protein, 15 aa, Homo sapiens
  Table 4 sequence identifier: Q5JSL3_C1204
  MOD_RES (6)..(6): May or may not be conjugated to a chemical probe
RDEFPCGFTSPANRG

SEQ ID NO: 8302 - protein, 12 aa, Homo sapiens
  Table 4 sequence identifier: P09564_C230
  MOD_RES (2)..(2): May or may not be conjugated to a chemical probe
RCNTLSSPNQYQ

SEQ ID NO: 8303 - protein, 11 aa, Homo sapiens
  Table 4 sequence identifier: P27635_C105
  MOD_RES (5)..(5): May or may not be conjugated to a chemical probe
KMLSCAGADRL

SEQ ID NO: 8304 - protein, 21 aa, Homo sapiens
  Table 4 sequence identifier: Q9UKA8_C173
  MOD_RES (16)..(16): May or may not be conjugated to a chemical probe
KQSEDAMPVINYDLLCAVSKL

SEQ ID NO: 8305 - protein, 14 aa, Homo sapiens
  Table 4 sequence identifier: P00492_C106
  MOD_RES (4)..(4): May or may not be conjugated to a chemical probe
KSYCNDQSTGDIKV

SEQ ID NO: 8306 - protein, 28 aa, Homo sapiens
  Table 4 sequence identifier: P26038_C117
  MOD_RES (11)..(11): May or may not be conjugated to a chemical probe
KEGILNDDIYCPPETAVLLASYAVQSKY

SEQ ID NO: 8307 - protein, 16 aa, Homo sapiens
  Table 4 sequence identifier: P12955_C482
  MOD_RES (13)..(13): May or may not be conjugated to a chemical probe
RTVEEIEACMAGCDKA

SEQ ID NO: 8308 - protein, 12 aa, Homo sapiens
  Table 4 sequence identifier: Q9NR33_C84
  MOD_RES (5)..(5): May or may not be conjugated to a chemical probe
KDAYCCAQQGKR

SEQ ID NO: 8309 - protein, 23 aa, Homo sapiens
  Table 4 sequence identifier: Q9H8W4_C219
  MOD_RES (18)..(18): May or may not be conjugated to a chemical probe
RICDFCYDLLSAGDMATCQPARS

SEQ ID NO: 8310 - protein, 27 aa, Homo sapiens
  Table 4 sequence identifier: Q8WYP5_C1131
  MOD_RES (16)..(16): May or may not be conjugated to a chemical probe
RLLDLVVQPVPRPSQCSEFIQQSSMKS

SEQ ID NO: 8311 - protein, 25 aa, Homo sapiens
  Table 4 sequence identifier: Q9Y6K5_C350
  MOD_RES (4)..(4): May or may not be conjugated to a chemical probe
RAGCSGLGHPIQLDPNQKTPENSKS

SEQ ID NO: 8312 - protein, 19 aa, Homo sapiens
  Table 4 sequence identifier: P41250_C616
  MOD_RES (2)..(2): May or may not be conjugated to a chemical probe
KCSVLPLSQNQEFMPFVKE

SEQ ID NO: 8313 - protein, 13 aa, Homo sapiens
  Table 4 sequence identifier: Q8NF50_C143
  MOD_RES (9)..(9): May or may not be conjugated to a chemical probe
KNQGSPEICGFKK

SEQ ID NO: 8314 - protein, 28 aa, Homo sapiens
  Table 4 sequence identifier: H3BQZ7_C57
  MOD_RES (26)..(26): May or may not be conjugated to a chemical probe
RLQEALDAEMLEDEAGGGGAGPGGACKA

SEQ ID NO: 8315 - protein, 28 aa, Homo sapiens
  Table 4 sequence identifier: Q1KMD3_C57
  MOD_RES (26)..(26): May or may not be conjugated to a chemical probe
RLQEALDAEMLEDEAGGGGAGPGGACKA

SEQ ID NO: 8316 - protein, 21 aa, Homo sapiens
  Table 4 sequence identifier: Q5JTH9_C102
  MOD_RES (13)..(13): May or may not be conjugated to a chemical probe
KSSGTFLSGLSDCTNVTFSKV

SEQ ID NO: 8317 - protein, 28 aa, Homo sapiens
  Table 4 sequence identifier: Q9C0C9_C910
  MOD_RES (12)..(12): May or may not be conjugated to a chemical probe
KAEWPSETPVLCQQCGGKPGVTFTSAKG

SEQ ID NO: 8318 - protein, 28 aa, Homo sapiens
  Table 4 sequence identifier: Q9C0C9_C913
  MOD_RES (15)..(15): May or may not be conjugated to a chemical probe
KAEWPSETPVLCQQCGGKPGVTFTSAKG

SEQ ID NO: 8319 - protein, 13 aa, Homo sapiens
  Table 4 sequence identifier: Q8NF50_C197
  MOD_RES (7)..(7): May or may not be conjugated to a chemical probe
KGPVTACDFDLRS

SEQ ID NO: 8320 - protein, 24 aa, Homo sapiens
  Table 4 sequence identifier: O95466_C45
  MOD_RES (5)..(5): May or may not be conjugated to a chemical probe
RALNCMNLPPDKVQLLSQYDNEKK

SEQ ID NO: 8321 - protein, 12 aa, Homo sapiens
  Table 4 sequence identifier: Q53GL7_C50
  MOD_RES (4)..(4): May or may not be conjugated to a chemical probe
RLGCGGVLTFRE

SEQ ID NO: 8322 - protein, 15 aa, Homo sapiens
  Table 4 sequence identifier: Q9P2R3_C675
  MOD_RES (12)..(12): May or may not be conjugated to a chemical probe
RNQLPLVVDAICTRG

SEQ ID NO: 8323 - protein, 23 aa, Homo sapiens
  Table 4 sequence identifier: O75607_C105
  MOD_RES (4)..(4): May or may not be conjugated to a chemical probe
KLSCQPMLSLDDFQLQPPVTFRL

SEQ ID NO: 8324 - protein, 25 aa, Homo sapiens
  Table 4 sequence identifier: Q9NXA8_C303
  MOD_RES (18)..(18): May or may not be conjugated to a chemical probe
RFHFQGPCGTTLPEALACHENETVS

SEQ ID NO: 8325 - protein, 22 aa, Homo sapiens
  Table 4 sequence identifier: Q00013_C454
  MOD_RES (10)..(10): May or may not be conjugated to a chemical probe
KLQEAFDQACSSPQWVPVSWVY

SEQ ID NO: 8326 - protein, 14 aa, Homo sapiens
  Table 4 sequence identifier: O60701_C276
  MOD_RES (10)..(10): May or may not be conjugated to a chemical probe
KASVGFGGSCFQKD

SEQ ID NO: 8327 - protein, 11 aa, Homo sapiens
  Table 4 sequence identifier: Q15149_C730
  MOD_RES (7)..(7): May or may not be conjugated to a chemical probe
RGAYRDCLGRL

SEQ ID NO: 8328 - protein, 34 aa, Homo sapiens; identical to SEQ ID NO: 3168
  Table 4 sequence identifier: Q9Y4P8_C393
  MOD_RES (20)..(20): May or may not be conjugated to a chemical probe

SEQ ID NO: 8329 - protein, 37 aa, Homo sapiens; identical to SEQ ID NO: 1600
  Table 4 sequence identifier: P27816_C126
  MOD_RES (20)..(20): May or may not be conjugated to a chemical probe

SEQ ID NO: 8330 - protein, 44 aa, Homo sapiens
  Table 4 sequence identifier: O95487_C87
  MOD_RES (11)..(11): May or may not be conjugated to a chemical probe
KMTSLPLDTQCGDYYSALYTVPTQNVTPNTVNQQPGAQQLYSRG

SEQ ID NO: 8331 - protein, 11 aa, Homo sapiens
  Table 4 sequence identifier: Q3SXM5_C265
  MOD_RES (2)..(2): May or may not be conjugated to a chemical probe
RCSWLVPSPKV

SEQ ID NO: 8332 - protein, 10 aa, Homo sapiens
  Table 4 sequence identifier: H3BQZ7_C293
  MOD_RES (5)..(5): May or may not be conjugated to a chemical probe
KGKVCFEAKV

SEQ ID NO: 8333 - protein, 10 aa, Homo sapiens
  Table 4 sequence identifier: Q1KMD3_C293
  MOD_RES (5)..(5): May or may not be conjugated to a chemical probe
KGKVCFEAKV

SEQ ID NO: 8334 - protein, 26 aa, Homo sapiens
  Table 4 sequence identifier: P16871_C349
  MOD_RES (11)..(11): May or may not be conjugated to a chemical probe
RLGGDVQSPNCPSEDVVITPESFGRD

SEQ ID NO: 8335 - protein, 14 aa, Homo sapiens
  Table 4 sequence identifier: Q9HB90_C377
  MOD_RES (3)..(3): May or may not be conjugated to a chemical probe
RSCGHQTSASSLKA

SEQ ID NO: 8336 - protein, 10 aa, Homo sapiens
  Table 4 sequence identifier: Q14919_C54
  MOD_RES (3)..(3): May or may not be conjugated to a chemical probe
KACQVTQSRN

SEQ ID NO: 8337 - protein, 16 aa, Homo sapiens
  Table 4 sequence identifier: Q86YS7_C867
  MOD_RES (6)..(6): May or may not be conjugated to a chemical probe
RSAPPCANSTVGVVKM

SEQ ID NO: 8338 - protein, 13 aa, Homo sapiens
  Table 4 sequence identifier: P49915_C456
  MOD_RES (11)..(11): May or may not be conjugated to a chemical probe
RVICAEEPYICKD

SEQ ID NO: 8339 - protein, 40 aa, Homo sapiens; identical to SEQ ID NO: 873
  Table 4 sequence identifier: Q13428_C1298
  MOD_RES (20)..(20): May or may not be conjugated to a chemical probe

SEQ ID NO: 8340 - protein, 14 aa, Homo sapiens
  Table 4 sequence identifier: Q9H9A6_C264
  MOD_RES (9)..(9): May or may not be conjugated to a chemical probe
RFLPEFPSCSLLKE

SEQ ID NO: 8341 - protein, 33 aa, Homo sapiens; identical to SEQ ID NO: 6302
  Table 4 sequence identifier: Q12802_C1548
  MOD_RES (28)..(28): May or may not be conjugated to a chemical probe

SEQ ID NO: 8342 - protein, 13 aa, Homo sapiens
  Table 4 sequence identifier: Q06330_C313
  MOD_RES (10)..(10): May or may not be conjugated to a chemical probe
RIIQFQATPCPKE

SEQ ID NO: 8343 - protein, 31 aa, Homo sapiens; identical to SEQ ID NO: 2675
  Table 4 sequence identifier: Q969E8_C17
  MOD_RES (5)..(5): May or may not be conjugated to a chemical probe

SEQ ID NO: 8344 - protein, 21 aa, Homo sapiens
  Table 4 sequence identifier: Q9ULT8_C254
  MOD_RES (16)..(16): May or may not be conjugated to a chemical probe
RMAAAGGTVSGPSSACKPGRS

SEQ ID NO: 8345 - protein, 10 aa, Homo sapiens
  Table 4 sequence identifier: P51858_C12
  MOD_RES (2)..(2): May or may not be conjugated to a chemical probe
KCGDLVFAKM

SEQ ID NO: 8346 - protein, 20 aa, Homo sapiens
  Table 4 sequence identifier: Q99543_C394
  MOD_RES (9)..(9): May or may not be conjugated to a chemical probe
RLELASLQCLNETLTSCTKE

SEQ ID NO: 8347 - protein, 29 aa, Homo sapiens
  Table 4 sequence identifier: P12268_C331
  MOD_RES (10)..(10): May or may not be conjugated to a chemical probe
RVGMGSGSICITQEVLACGRPQATAVYKV

SEQ ID NO: 8348 - protein, 12 aa, Homo sapiens
  Table 4 sequence identifier: P42166_C341
  MOD_RES (8)..(8): May or may not be conjugated to a chemical probe
KSGIQPLCPERS

SEQ ID NO: 8349 - protein, 20 aa, Homo sapiens
  Table 4 sequence identifier: Q92888_C911
  MOD_RES (19)..(19): May or may not be conjugated to a chemical probe
RLRPLLSQLGGNSVPQPGCT

SEQ ID NO: 8350 - protein, 18 aa, Homo sapiens
  Table 4 sequence identifier: Q9BZ29_C628
  MOD_RES (14)..(14): May or may not be conjugated to a chemical probe
KTPITFEVEEFVPCIPKH

SEQ ID NO: 8351 - protein, 11 aa, Homo sapiens
  Table 4 sequence identifier: O95336_C78
  MOD_RES (7)..(7): May or may not be conjugated to a chemical probe
RWTLGFCDERL

SEQ ID NO: 8352 - protein, 17 aa, Homo sapiens
  Table 4 sequence identifier: Q9UEW8_C525
  MOD_RES (6)..(6): May or may not be conjugated to a chemical probe
KLASGCDGSEIPDEVKL

SEQ ID NO: 8353 - protein, 14 aa, Homo sapiens
  Table 4 sequence identifier: Q63HN8_C614
  MOD_RES (10)..(10): May or may not be conjugated to a chemical probe
KSTDFLPVDCPVRS

SEQ ID NO: 8354 - protein, 19 aa, Homo sapiens
  Table 4 sequence identifier: P49023_C108
  MOD_RES (16)..(16): May or may not be conjugated to a chemical probe
KTSSVSNPQDSVGSPCSRV

SEQ ID NO: 8355 - protein, 30 aa, Homo sapiens
  Table 4 sequence identifier: Q16666_C679
  MOD_RES (13)..(13): May or may not be conjugated to a chemical probe
RSASVTPKINQLCSQTKGSFVNGVFEVHKK

SEQ ID NO: 8356 - protein, 27 aa, Homo sapiens
  Table 4 sequence identifier: Q9Y5Y2_C196
  MOD_RES (14)..(14): May or may not be conjugated to a chemical probe
RVMGIVENMSGFTCPHCTECTSVFSRG

SEQ ID NO: 8357 - protein, 27 aa, Homo sapiens
  Table 4 sequence identifier: Q9Y5Y2_C202
  MOD_RES (20)..(20): May or may not be conjugated to a chemical probe
RVMGIVENMSGFTCPHCTECTSVFSRG

SEQ ID NO: 8358 - protein, 40 aa, Homo sapiens
  Table 4 sequence identifier: Q9GZR7_C49
  MOD_RES (17)..(17): May or may not be conjugated to a chemical probe
KIDPNMFADGQMDDLVCFEELTDYQLVSPAKNPSSLFSKE

SEQ ID NO: 8359 - protein, 20 aa, Homo sapiens
  Table 4 sequence identifier: Q96F63_C78
  MOD_RES (5)..(5): May or may not be conjugated to a chemical probe
RLPVCSQQQGEPDLTEHEKV

SEQ ID NO: 8360 - protein, 27 aa, Homo sapiens
  Table 4 sequence identifier: Q9Y5Y2_C199
  MOD_RES (17)..(17): May or may not be conjugated to a chemical probe
RVMGIVENMSGFTCPHCTECTSVFSRG

SEQ ID NO: 8361 - protein, 16 aa, Homo sapiens
  Table 4 sequence identifier: Q96F07_C1112
  MOD_RES (4)..(4): May or may not be conjugated to a chemical probe
RLCCGLSMFEVILTRI

SEQ ID NO: 8362 - protein, 12 aa, Homo sapiens
  Table 4 sequence identifier: Q9UPU5_C153
  MOD_RES (2)..(2): May or may not be conjugated to a chemical probe
KCLLASTYLARL

SEQ ID NO: 8363 - protein, 39 aa, Homo sapiens; identical to SEQ ID NO: 3463
  Table 4 sequence identifier: P02545_C570
  MOD_RES (26)..(26): May or may not be conjugated to a chemical probe

SEQ ID NO: 8364 - protein, 16 aa, Homo sapiens
  Table 4 sequence identifier: Q7L576_C1088
  MOD_RES (4)..(4): May or may not be conjugated to a chemical probe
RLCCGLSMFEVILTRI

SEQ ID NO: 8365 - protein, 12 aa, Homo sapiens
  Table 4 sequence identifier: O95671_C333
  MOD_RES (7)..(7): May or may not be conjugated to a chemical probe
KVDASACGMERL

SEQ ID NO: 8366 - protein, 16 aa, Homo sapiens
  Table 4 sequence identifier: Q7Z6B0_C424
  MOD_RES (12)..(12): May or may not be conjugated to a chemical probe
RSLSSLELFLSCAQKQ

SEQ ID NO: 8367 - protein, 22 aa, Homo sapiens
  Table 4 sequence identifier: P49321_C708
  MOD_RES (12)..(12): May or may not be conjugated to a chemical probe
RKPTDGASSSNCVTDISHLVRK

SEQ ID NO: 8368 - protein, 38 aa, Homo sapiens; identical to SEQ ID NO: 760
  Table 4 sequence identifier: P61978_C132
  MOD_RES (30)..(30): May or may not be conjugated to a chemical probe

SEQ ID NO: 8369 - protein, 34 aa, Homo sapiens; identical to SEQ ID NO: 161
  Table 4 sequence identifier: P42224_C255
  MOD_RES (14)..(14): May or may not be conjugated to a chemical probe

SEQ ID NO: 8370 - protein, 13 aa, Homo sapiens
  Table 4 sequence identifier: Q01518_C427
  MOD_RES (6)..(6): May or may not be conjugated to a chemical probe
KNSLDCEIVSAKS

SEQ ID NO: 8371 - protein, 10 aa, Homo sapiens
  Table 4 sequence identifier: O94874_C32
  MOD_RES (3)..(3): May or may not be conjugated to a chemical probe
RNCIEIVNKL

SEQ ID NO: 8372 - protein, 34 aa, Homo sapiens; identical to SEQ ID NO: 161
  Table 4 sequence identifier: P42224_C247
  MOD_RES (6)..(6): May or may not be conjugated to a chemical probe

SEQ ID NO: 8373 - protein, 10 aa, Homo sapiens
  Table 4 sequence identifier: Q96BY6_C2164
  MOD_RES (7)..(7): May or may not be conjugated to a chemical probe
RGVDQTCTRV

SEQ ID NO: 8374 - protein, 21 aa, Homo sapiens
  Table 4 sequence identifier: O43586_C305
  MOD_RES (16)..(16): May or may not be conjugated to a chemical probe
REVTPLTSSPGIQPSCGMIKR

SEQ ID NO: 8375 - protein, 39 aa, Homo sapiens; identical to SEQ ID NO: 379
  Table 4 sequence identifier: P50851_C1704
  MOD_RES (22)..(22): May or may not be conjugated to a chemical probe

SEQ ID NO: 8376 - protein, 16 aa, Homo sapiens
  Table 4 sequence identifier: Q96QR8_C17
  MOD_RES (8)..(8): May or may not be conjugated to a chemical probe
RGGGGGPCGFQPASRG

SEQ ID NO: 8377 - protein, 13 aa, Homo sapiens
  Table 4 sequence identifier: Q9H3H3_C222
  MOD_RES (5)..(5): May or may not be conjugated to a chemical probe
RWHLCPTLYESRF

SEQ ID NO: 8378 - protein, 23 aa, Homo sapiens
  Table 4 sequence identifier: Q14997_C1840
  MOD_RES (20)..(20): May or may not be conjugated to a chemical probe
KQQFTDDQLLVLTDLLVSPCYYA

SEQ ID NO: 8379 - protein, 15 aa, Homo sapiens
  Table 4 sequence identifier: Q9BUP3_C172
  MOD_RES (12)..(12): May or may not be conjugated to a chemical probe
RYSVFRPGVLLCDRQ

SEQ ID NO: 8380 - protein, 30 aa, Homo sapiens
  Table 4 sequence identifier: Q5VSL9_C769
  MOD_RES (26)..(26): May or may not be conjugated to a chemical probe
RHRLNDDWAYGNDLDARPWDFQAEECALRA

SEQ ID NO: 8381 - protein, 27 aa, Homo sapiens
  Table 4 sequence identifier: Q9NW68_C49
  MOD_RES (16)..(16): May or may not be conjugated to a chemical probe
RDLTEFTQVVQHDTACTIAATASVVKE

SEQ ID NO: 8382 - protein, 15 aa, Homo sapiens
  Table 4 sequence identifier: Q96F07_C1265
  MOD_RES (2)..(2): May or may not be conjugated to a chemical probe
RCFQPPIHQSLATTC

SEQ ID NO: 8383 - protein, 9 aa, Homo sapiens
  Table 4 sequence identifier: P60468_C39
  MOD_RES (5)..(5): May or may not be conjugated to a chemical probe
KNASCGTRS

SEQ ID NO: 8384 - protein, 11 aa, Homo sapiens
  Table 4 sequence identifier: Q15061_C380
  MOD_RES (6)..(6): May or may not be conjugated to a chemical probe
RDISNCWAPKV

SEQ ID NO: 8385 - protein, 15 aa, Homo sapiens
  Table 4 sequence identifier: Q04759_C322
  MOD_RES (11)..(11): May or may not be conjugated to a chemical probe
REGPVEIGLPCSIKN

SEQ ID NO: 8386 - protein, 23 aa, Homo sapiens
  Table 4 sequence identifier: Q13615_C826
  MOD_RES (10)..(10): May or may not be conjugated to a chemical probe
KVGYGTSQSCSLLPSQVPFETRG

SEQ ID NO: 8387 - protein, 16 aa, Homo sapiens
  Table 4 sequence identifier: Q13630_C116
  MOD_RES (10)..(10): May or may not be conjugated to a chemical probe
RKVVSCLSTCIFPDKT

SEQ ID NO: 8388 - protein, 7 aa, Homo sapiens
  Table 4 sequence identifier: Q9Y6R4_C1604
  MOD_RES (3)..(3): May or may not be conjugated to a chemical probe
KVCTDEE

SEQ ID NO: 8389 - protein, 26 aa, Homo sapiens
  Table 4 sequence identifier: P49711_C155
  MOD_RES (12)..(12): May or may not be conjugated to a chemical probe
KEGLAESEPMICHTLPLPEGFQVVKV

SEQ ID NO: 8390 - protein, 28 aa, Homo sapiens
  Table 4 sequence identifier: Q9UPS6_C1405
  MOD_RES (21)..(21): May or may not be conjugated to a chemical probe
RDFSFTPTFSEPSGPLLLPVCPLPTGRR

SEQ ID NO: 8391 - protein, 31 aa, Homo sapiens; identical to SEQ ID NO: 3296
  Table 4 sequence identifier: Q8WVT3_C160
  MOD_RES (24)..(24): May or may not be conjugated to a chemical probe

SEQ ID NO: 8392 - protein, 10 aa, Homo sapiens
  Table 4 sequence identifier: P55060_C842
  MOD_RES (3)..(3): May or may not be conjugated to a chemical probe
KICAVGITKL

SEQ ID NO: 8393 - protein, 32 aa, Homo sapiens
  Table 4 sequence identifier: Q9BSJ8_C611
  MOD_RES (18)..(18): May or may not be conjugated to a chemical probe
RILYLDSSEICFPTVPGCPGAWDVDSENPQRG

SEQ ID NO: 8394 - protein, 13 aa, Homo sapiens
  Table 4 sequence identifier: P52948_C1027
  MOD_RES (9)..(9): May or may not be conjugated to a chemical probe
KADTSQEICSPRL

SEQ ID NO: 8395 - protein, 28 aa, Homo sapiens
  Table 4 sequence identifier: P50991_C120
  MOD_RES (25)..(25): May or may not be conjugated to a chemical probe
KAQDIEAGDGTTSVVIIAGSLLDSCTKL

SEQ ID NO: 8396 - protein, 10 aa, Homo sapiens
  Table 4 sequence identifier: Q13107_C702
  MOD_RES (7)..(7): May or may not be conjugated to a chemical probe
KIKGQPCPKR

SEQ ID NO: 8397 - protein, 17 aa, Homo sapiens
  Table 4 sequence identifier: P22681_C508
  MOD_RES (3)..(3): May or may not be conjugated to a chemical probe
RVCVPSSASALGTASKA

SEQ ID NO: 8398 - protein, 11 aa, Homo sapiens
  Table 4 sequence identifier: Q08117_C26
  MOD_RES (8)..(8): May or may not be conjugated to a chemical probe
KFTTSDSCDRI

SEQ ID NO: 8399 - protein, 21 aa, Homo sapiens
  Table 4 sequence identifier: P19784_C336
  MOD_RES (7)..(7): May or may not be conjugated to a chemical probe
KEQSQPCADNAVLSSGLTAAR

SEQ ID NO: 8400 - protein, 33 aa, Homo sapiens; identical to SEQ ID NO: 1220
  Table 4 sequence identifier: Q16576_C97
  MOD_RES (16)..(16): May or may not be conjugated to a chemical probe

SEQ ID NO: 8401 - protein, 26 aa, Homo sapiens
  Table 4 sequence identifier: Q8NBF2_C716
  MOD_RES (18)..(18): May or may not be conjugated to a chemical probe
KAILFSQPLQITDTQQGCIAPVELRY

SEQ ID NO: 8402 - protein, 11 aa, Homo sapiens
  Table 4 sequence identifier: Q00403_C223
  MOD_RES (7)..(7): May or may not be conjugated to a chemical probe
RFCSNLCLPKQ

SEQ ID NO: 8403 - protein, 20 aa, Homo sapiens
  Table 4 sequence identifier: P46527_C148
  MOD_RES (15)..(15): May or may not be conjugated to a chemical probe
KTDPSDSQTGLAEQCAGIRK

SEQ ID NO: 8404 - protein, 17 aa, Homo sapiens
  Table 4 sequence identifier: P17844_C191
  MOD_RES (15)..(15): May or may not be conjugated to a chemical probe
RELAQQVQQVAAEYCRA

SEQ ID NO: 8405 - protein, 9 aa, Homo sapiens
  Table 4 sequence identifier: P22061_C102
  MOD_RES (5)..(5): May or may not be conjugated to a chemical probe
RMVGCTGKV

SEQ ID NO: 8406 - protein, 30 aa, Homo sapiens; identical to SEQ ID NO: 1666
  Table 4 sequence identifier: P35611_C430
  MOD_RES (25)..(25): May or may not be conjugated to a chemical probe

SEQ ID NO: 8407 - protein, 15 aa, Homo sapiens
  Table 4 sequence identifier: P52888_C682
  MOD_RES (8)..(8): May or may not be conjugated to a chemical probe
KGLQVGGCEPEPQVC

SEQ ID NO: 8408 - protein, 28 aa, Homo sapiens
  Table 4 sequence identifier: Q01081_C67
  MOD_RES (2)..(2): May or may not be conjugated to a chemical probe
RCAVSDVEMQEHYDEFFEEVFTEMEEKY

SEQ ID NO: 8409 - protein, 23 aa, Homo sapiens
  Table 4 sequence identifier: Q96BY9_C320
  MOD_RES (16)..(16): May or may not be conjugated to a chemical probe
RAYSPLHGGSGSYSVCSNSDTKT

SEQ ID NO: 8410 - protein, 11 aa, Homo sapiens
  Table 4 sequence identifier: Q14152_C78
  MOD_RES (4)..(4): May or may not be conjugated to a chemical probe
KNICQQVNIKS

SEQ ID NO: 8411 - protein, 24 aa, Homo sapiens
  Table 4 sequence identifier: P13489_C409
  MOD_RES (9)..(9): May or may not be conjugated to a chemical probe
RELDLSNNCLGDAGILQLVESVRQ

SEQ ID NO: 8412 - protein, 10 aa, Homo sapiens
  Table 4 sequence identifier: Q07960_C91
  MOD_RES (8)..(8): May or may not be conjugated to a chemical probe
KIIVFSACRM

SEQ ID NO: 8413 - protein, 16 aa, Homo sapiens
  Table 4 sequence identifier: Q9UGP4_C305
  MOD_RES (13)..(13): May or may not be conjugated to a chemical probe
RTPSVSAPLALSCPRQ

SEQ ID NO: 8414 - protein, 23 aa, Homo sapiens
  Table 4 sequence identifier: P27816_C535
  MOD_RES (4)..(4): May or may not be conjugated to a chemical probe
KNVCLPPEMEVALTEDQVPALKT

SEQ ID NO: 8415 - protein, 31 aa, Homo sapiens
  Table 4 sequence identifier: Q8NCE2_C182
  MOD_RES (27)..(27): May or may not be conjugated to a chemical probe
RSGYNYFFSGGADDAWADVEDVTEEDCALRS

SEQ ID NO: 8416 - protein, 32 aa, Homo sapiens; identical to SEQ ID NO: 1513
  Table 4 sequence identifier: O00273_C154
  MOD_RES (23)..(23): May or may not be conjugated to a chemical probe

SEQ ID NO: 8417 - protein, 24 aa, Homo sapiens
  Table 4 sequence identifier: Q92973_C153
  MOD_RES (14)..(14): May or may not be conjugated to a chemical probe
KLCSLLDSEDYNTCEGAFGALQKI

SEQ ID NO: 8418 - protein, 39 aa, Homo sapiens
  Table 4 sequence identifier: P51608_C413
  MOD_RES (37)..(37): May or may not be conjugated to a chemical probe
KAPVPLLPPLPPPPPEPESSEDPTSPPEPQDLSSSVCKE

SEQ ID NO: 8419 - protein, 14 aa, Homo sapiens
  Table 4 sequence identifier: Q63HN8_C3008
  MOD_RES (2)..(2): May or may not be conjugated to a chemical probe
KCSEEVSPMQLIKQ

SEQ ID NO: 8420 - protein, 21 aa, Homo sapiens
  Table 4 sequence identifier: O15294_C620
  MOD_RES (17)..(17): May or may not be conjugated to a chemical probe
KVMAEANHFIDLSQIPCNGKA

SEQ ID NO: 8421 - protein, 38 aa, Homo sapiens; identical to SEQ ID NO: 79
  Table 4 sequence identifier: P42166_C561
  MOD_RES (27)..(27): May or may not be conjugated to a chemical probe

SEQ ID NO: 8422 - protein, 44 aa, Homo sapiens
  Table 4 sequence identifier: Q6F5E8_C746
  MOD_RES (32)..(32): May or may not be conjugated to a chemical probe
RLQPLGLVSDPSEQEVNELCQSVQEHVELLGCGAGPQGEAAVRQ

SEQ ID NO: 8423 - protein, 26 aa, Homo sapiens
  Table 4 sequence identifier: P55265_C392
  MOD_RES (9)..(9): May or may not be conjugated to a chemical probe
KRNAEFLTCNIPTSNASNNMVTTEKV

SEQ ID NO: 8424 - protein, 21 aa, Homo sapiens
  Table 4 sequence identifier: Q8NB37_C154
  MOD_RES (16)..(16): May or may not be conjugated to a chemical probe
RSWVFDSYSLTGPSVCELVRA

SEQ ID NO: 8425 - protein, 29 aa, Homo sapiens
  Table 4 sequence identifier: Q6JBY9_C155
  MOD_RES (25)..(25): May or may not be conjugated to a chemical probe
RSRPSEAEEVPVSFDQPPEGSHLPCYNKV

SEQ ID NO: 8426 - protein, 12 aa, Homo sapiens
  Table 4 sequence identifier: Q9UJU2_C321
  MOD_RES (8)..(8): May or may not be conjugated to a chemical probe
RANVVAECTLKE

SEQ ID NO: 8427 - protein, 23 aa, Homo sapiens
  Table 4 sequence identifier: O00186_C501
  MOD_RES (9)..(9): May or may not be conjugated to a chemical probe
KEWPYCSQCPAVWNGSGAVSARQ

SEQ ID NO: 8428 - protein, 12 aa, Homo sapiens
  Table 4 sequence identifier: Q96BY6_C1310
  MOD_RES (9)..(9): May or may not be conjugated to a chemical probe
KSSEKTDNCEKI

SEQ ID NO: 8429 - protein, 23 aa, Homo sapiens
  Table 4 sequence identifier: O00186_C498
  MOD_RES (6)..(6): May or may not be conjugated to a chemical probe
KEWPYCSQCPAVWNGSGAVSARQ

SEQ ID NO: 8430 - protein, 11 aa, Homo sapiens
  Table 4 sequence identifier: P63104_C25
  MOD_RES (8)..(8): May or may not be conjugated to a chemical probe
RYDDMAACMKS

SEQ ID NO: 8431 - protein, 25 aa, Homo sapiens
  Table 4 sequence identifier: Q8WU79_C196
  MOD_RES (18)..(18): May or may not be conjugated to a chemical probe
KSTAPVMDLLGLDAPVACSIANSKT

SEQ ID NO: 8432 - protein, 11 aa, Homo sapiens
  Table 4 sequence identifier: Q00765_C18
  MOD_RES (3)..(3): May or may not be conjugated to a chemical probe
KNCMTDLLAKL

SEQ ID NO: 8433 - protein, 31 aa, Homo sapiens
  Table 4 sequence identifier: P51608_C429
  MOD_RES (10)..(10): May or may not be conjugated to a chemical probe
RGGSLESDGCPKEPAKTQPAVATAATAAEKY

SEQ ID NO: 8434 - protein, 11 aa, Homo sapiens
  Table 4 sequence identifier: O60841_C749
  MOD_RES (2)..(2): May or may not be conjugated to a chemical probe
KCPFIVALNKI

SEQ ID NO: 8435 - protein, 47 aa, Homo sapiens
  Table 4 sequence identifier: P42331_C524
  MOD_RES (27)..(27): May or may not be conjugated to a chemical probe
RTSTYDNVPSLPGSPGEEASALSSQACDSKGDTLASPNSETGPGKKN

SEQ ID NO: 8436 - protein, 16 aa, Homo sapiens
  Table 4 sequence identifier: P35579_C988
  MOD_RES (14)..(14): May or may not be conjugated to a chemical probe
KLEEEQIILEDQNCKL

SEQ ID NO: 8437 - protein, 9 aa, Homo sapiens
  Table 4 sequence identifier: Q14151_C672
  MOD_RES (6)..(6): May or may not be conjugated to a chemical probe
RLQLECQRQ

SEQ ID NO: 8438 - protein, 19 aa, Homo sapiens
  Table 4 sequence identifier: Q99490_C811
  MOD_RES (7)..(7): May or may not be conjugated to a chemical probe
RALSTDCTPSGDLSPLSRE

SEQ ID NO: 8439 - protein, 37 aa, Homo sapiens
  Table 4 sequence identifier: O60307_C762
  MOD_RES (10)..(10): May or may not be conjugated to a chemical probe
RSWTSSGSSCQSSSSQPERGPSPSLLNTISLDTMPKF

SEQ ID NO: 8440 - protein, 15 aa, Homo sapiens
  Table 4 sequence identifier: P27707_C9
  MOD_RES (3)..(3): May or may not be conjugated to a chemical probe
RSCPSFSASSEGTRI

SEQ ID NO: 8441 - protein, 30 aa, Homo sapiens; identical to SEQ ID NO: 4750
  Table 4 sequence identifier: Q99704_C308
  MOD_RES (5)..(5): May or may not be conjugated to a chemical probe

SEQ ID NO: 8442 - protein, 23 aa, Homo sapiens
  Table 4 sequence identifier: O75940_C214
  MOD_RES (7)..(7): May or may not be conjugated to a chemical probe
KVGVGTCGIADKPMTQYQDTSKY

SEQ ID NO: 8443 - protein, 10 aa, Homo sapiens
  Table 4 sequence identifier: O15269_C438
  MOD_RES (2)..(2): May or may not be conjugated to a chemical probe
KCLPPPSIRV

SEQ ID NO: 8444 - protein, 31 aa, Homo sapiens
  Table 4 sequence identifier: Q5EBM0_C119
  MOD_RES (6)..(6): May or may not be conjugated to a chemical probe
RLLCYCPGGQAGGAQQGFLLRDPLDDPDTRQ

SEQ ID NO: 8445 - protein, 17 aa, Homo sapiens
  Table 4 sequence identifier: Q96F86_C137
  MOD_RES (14)..(14): May or may not be conjugated to a chemical probe
KSQDVAVSPQQQQCSKS

SEQ ID NO: 8446 - protein, 20 aa, Homo sapiens
  Table 4 sequence identifier: Q86YV0_C1005
  MOD_RES (14)..(14): May or may not be conjugated to a chemical probe
RGSWSQPQPLKAPCLNGDTT

SEQ ID NO: 8447 - protein, 24 aa, Homo sapiens
  Table 4 sequence identifier: P30044_C204
  MOD_RES (14)..(14): May or may not be conjugated to a chemical probe
KALNVEPDGTGLTCSLAPNIISQL

SEQ ID NO: 8448 - protein, 20 aa, Homo sapiens
  Table 4 sequence identifier: P78527_C1904
  MOD_RES (10)..(10): May or may not be conjugated to a chemical probe
KINQVFHGSCITEGNELTKT

SEQ ID NO: 8449 - protein, 20 aa, Homo sapiens
  Table 4 sequence identifier: Q9BXP2_C911
  MOD_RES (17)..(17): May or may not be conjugated to a chemical probe
RDLGPTLLVHGVTPVTCTDL

SEQ ID NO: 8450 - protein, 55 aa, Homo sapiens; identical to SEQ ID NO: 98
  Table 4 sequence identifier: Q9Y6G9_C51
  MOD_RES (46)..(46): May or may not be conjugated to a chemical probe

SEQ ID NO: 8451 - protein, 16 aa, Homo sapiens
  Table 4 sequence identifier: Q12962_C174
  MOD_RES (14)..(14): May or may not be conjugated to a chemical probe
KFISDIANDALQHCKM

SEQ ID NO: 8452 - protein, 25 aa, Homo sapiens
  Table 4 sequence identifier: Q8IV53_C412
  MOD_RES (16)..(16): May or may not be conjugated to a chemical probe
KGEGFSDQFEQEITGCGASSGALRS

SEQ ID NO: 8453 - protein, 9 aa, Homo sapiens
  Table 4 sequence identifier: Q8NFW8_C364
  MOD_RES (6)..(6): May or may not be conjugated to a chemical probe
KEMGLCWKE

SEQ ID NO: 8454 - protein, 24 aa, Homo sapiens
  Table 4 sequence identifier: Q7Z4S6_C299
  MOD_RES (8)..(8): May or may not be conjugated to a chemical probe
KEGISINCGLLALGNVISALGDKS

SEQ ID NO: 8455 - protein, 15 aa, Homo sapiens
  Table 4 sequence identifier: Q9Y383_C348
  MOD_RES (10)..(10): May or may not be conjugated to a chemical probe
RFRDQDLASCDRDRS

SEQ ID NO: 8456 - protein, 16 aa, Homo sapiens
  Table 4 sequence identifier: Q12768_C21
  MOD_RES (5)..(5): May or may not be conjugated to a chemical probe
RIVSCGNAIIAELLRL

SEQ ID NO: 8457 - protein, 11 aa, Homo sapiens
  Table 4 sequence identifier: Q9ULX6_C211
  MOD_RES (4)..(4): May or may not be conjugated to a chemical probe
RGQCMSGASRL

SEQ ID NO: 8458 - protein, 20 aa, Homo sapiens
  Table 4 sequence identifier: Q2NKJ3_C584
  MOD_RES (15)..(15): May or may not be conjugated to a chemical probe
KALLPLPEASYLPSCQLNRR

SEQ ID NO: 8459 - protein, 18 aa, Homo sapiens
  Table 4 sequence identifier: Q7Z4W1_C138
  MOD_RES (14)..(14): May or may not be conjugated to a chemical probe
RGVPGAIVNVSSQCSQRA

SEQ ID NO: 8460 - protein, 13 aa, Homo sapiens
  Table 4 sequence identifier: P78527_C1507
  MOD_RES (11)..(11): May or may not be conjugated to a chemical probe
RQCLPSLDLSCKQ

SEQ ID NO: 8461 - protein, 16 aa, Homo sapiens
  Table 4 sequence identifier: Q9NQC3_C1101
  MOD_RES (12)..(12): May or may not be conjugated to a chemical probe
KYSNSALGHVNCTIKE

SEQ ID NO: 8462 - protein, 15 aa, Homo sapiens
  Table 4 sequence identifier: Q8NCE2_C429
  MOD_RES (11)..(11): May or may not be conjugated to a chemical probe
RDGGFTLEDICMLRR

SEQ ID NO: 8463 - protein, 14 aa, Homo sapiens
  Table 4 sequence identifier: P41227_C194
  MOD_RES (12)..(12): May or may not be conjugated to a chemical probe
KGNSPPSSGEACRE

SEQ ID NO: 8464 - protein, 34 aa, Homo sapiens
  Table 4 sequence identifier: Q08AF3_C846
  MOD_RES (32)..(32): May or may not be conjugated to a chemical probe
KLSQLHEESDLLLQIGDASDVLTDHIVLDSVCRF

SEQ ID NO: 8465 - protein, 9 aa, Homo sapiens
  Table 4 sequence identifier: Q9NXG2_C31
  MOD_RES (2)..(2): May or may not be conjugated to a chemical probe
RCDAGGPRQ

SEQ ID NO: 8466 - protein, 22 aa, Homo sapiens
  Table 4 sequence identifier: Q00722_C945
  MOD_RES (20)..(20): May or may not be conjugated to a chemical probe
RGAAQLAELGPPGVGGVGACKL

SEQ ID NO: 8467 - protein, 27 aa, Homo sapiens
  Table 4 sequence identifier: Q14694_C94
  MOD_RES (22)..(22): May or may not be conjugated to a chemical probe
RTPSYSISSTLNPQAPEFILGCTASKI

SEQ ID NO: 8468 - protein, 15 aa, Homo sapiens
  Table 4 sequence identifier: Q12933_C287
  MOD_RES (10)..(10): May or may not be conjugated to a chemical probe
KTATFENIVCVLNRE

SEQ ID NO: 8469 - protein, 41 aa, Homo sapiens; identical to SEQ ID NO: 388
  Table 4 sequence identifier: P14735_C974
  MOD_RES (14)..(14): May or may not be conjugated to a chemical probe

SEQ ID NO: 8470 - protein, 24 aa, Homo sapiens
  Table 4 sequence identifier: P32456_C405
  MOD_RES (7)..(7): May or may not be conjugated to a chemical probe
KASSDCCMALLQDIFGPLEEDVKQ

SEQ ID NO: 8471 - protein, 24 aa, Homo sapiens
  Table 4 sequence identifier: P32456_C404
  MOD_RES (6)..(6): May or may not be conjugated to a chemical probe
KASSDCCMALLQDIFGPLEEDVKQ

SEQ ID NO: 8472 - protein, 26 aa, Homo sapiens
  Table 4 sequence identifier: Q6PJG6_C539
  MOD_RES (2)..(2): May or may not be conjugated to a chemical probe
RCALLASEVPQLALQLLQDPESYVRA

SEQ ID NO: 8473 - protein, 18 aa, Homo sapiens
  Table 4 sequence identifier: Q9NPG8_C337
  MOD_RES (14)..(14): May or may not be conjugated to a chemical probe
RSNLQEIFLPAFPCHERK

SEQ ID NO: 8474 - protein, 11 aa, Homo sapiens
  Table 4 sequence identifier: Q9Y2K7_C840
  MOD_RES (7)..(7): May or may not be conjugated to a chemical probe
RVLVQHCPART

SEQ ID NO: 8475 - protein, 9 aa, Homo sapiens
  Table 4 sequence identifier: P12081_C507
  MOD_RES (7)..(7): May or may not be conjugated to a chemical probe
RTGQPLCIC

SEQ ID NO: 8476 - protein, 13 aa, Homo sapiens
  Table 4 sequence identifier: Q13469_C231
  MOD_RES (9)..(9): May or may not be conjugated to a chemical probe
RTSLAEDSCLGRH

SEQ ID NO: 8477 - protein, 27 aa, Homo sapiens
  Table 4 sequence identifier: Q16611_C14
  MOD_RES (4)..(4): May or may not be conjugated to a chemical probe
RQECGEPALPSASEEQVAQDTEEVFRS

SEQ ID NO: 8478 - protein, 10 aa, Homo sapiens
  Table 4 sequence identifier: P35579_C931
  MOD_RES (2)..(2): May or may not be conjugated to a chemical probe
RCQHLQAEKK

SEQ ID NO: 8479 - protein, 20 aa, Homo sapiens
  Table 4 sequence identifier: Q9UFW8_C92
  MOD_RES (11)..(11): May or may not be conjugated to a chemical probe
KQRPLTASLQCNSTAQTEKV

SEQ ID NO: 8480 - protein, 35 aa, Homo sapiens
  Table 4 sequence identifier: P11171_C49
  MOD_RES (31)..(31): May or may not be conjugated to a chemical probe
KEEGEEAINSGQQEPQQEESCQTAAEGDNWCEQKL

SEQ ID NO: 8481 - protein, 18 aa, Homo sapiens
  Table 4 sequence identifier: Q9UQ35_C2116
  MOD_RES (4)..(4): May or may not be conjugated to a chemical probe
RMSCFSRPSMSPTPLDRC

SEQ ID NO: 8482 - protein, 26 aa, Homo sapiens
  Table 4 sequence identifier: Q8WXI9_C308
  MOD_RES (23)..(23): May or may not be conjugated to a chemical probe
RTTTPNMNPAINYQPQSSSSVPCQRT

SEQ ID NO: 8483 - protein, 22 aa, Homo sapiens
  Table 4 sequence identifier: Q96EY8_C132
  MOD_RES (17)..(17): May or may not be conjugated to a chemical probe
KIQCTLQDVGSALATPCSSARE

SEQ ID NO: 8484 - protein, 12 aa, Homo sapiens
  Table 4 sequence identifier: Q01433_C107
  MOD_RES (9)..(9): May or may not be conjugated to a chemical probe
RSLPGPAPCLKH

SEQ ID NO: 8485 - protein, 13 aa, Homo sapiens
  Table 4 sequence identifier: Q9H0L4_C150
  MOD_RES (3)..(3): May or may not be conjugated to a chemical probe
KLCVQNSHQEARN

SEQ ID NO: 8486 - protein, 27 aa, Homo sapiens
  Table 4 sequence identifier: P16188_C363
  MOD_RES (25)..(25): May or may not be conjugated to a chemical probe
RKGGSYTQAASSDSAQGSDVSLTACKV

SEQ ID NO: 8487 - protein, 27 aa, Homo sapiens
  Table 4 sequence identifier: P04439_C363
  MOD_RES (25)..(25): May or may not be conjugated to a chemical probe
RKGGSYTQAASSDSAQGSDVSLTACKV

SEQ ID NO: 8488 - protein, 27 aa, Homo sapiens
  Table 4 sequence identifier: P30443_C363
  MOD_RES (25)..(25): May or may not be conjugated to a chemical probe
RKGGSYTQAASSDSAQGSDVSLTACKV

SEQ ID NO: 8489 - protein, 13 aa, Homo sapiens
  Table 4 sequence identifier: O75663_C87
  MOD_RES (4)..(4): May or may not be conjugated to a chemical probe
KVACAEEWQESRT

SEQ ID NO: 8490 - protein, 20 aa, Homo sapiens
  Table 4 sequence identifier: P19838_C61
  MOD_RES (4)..(4): May or may not be conjugated to a chemical probe
RYVCEGPSHGGLPGASSEKN

SEQ ID NO: 8491 - protein, 19 aa, Homo sapiens
  Table 4 sequence identifier: P07858_C319
  MOD_RES (6)..(6): May or may not be conjugated to a chemical probe
RGQDHCGIESEVVAGIPRT

SEQ ID NO: 8492 - protein, 13 aa, Homo sapiens
  Table 4 sequence identifier: O60502_C596
  MOD_RES (11)..(11): May or may not be conjugated to a chemical probe
RANSSVVSVNCKG

SEQ ID NO: 8493 - protein, 9 aa, Homo sapiens
  Table 4 sequence identifier: Q9HB58_C283
  MOD_RES (2)..(2): May or may not be conjugated to a chemical probe
RCIWSTPKR

SEQ ID NO: 8494 - protein, 21 aa, Homo sapiens
  Table 4 sequence identifier: P21333_C2543
  MOD_RES (4)..(4): May or may not be conjugated to a chemical probe
KATCAPQHGAPGPGPADASKV

SEQ ID NO: 8495 - protein, 29 aa, Homo sapiens
  Table 4 sequence identifier: Q9BTE6_C209
  MOD_RES (13)..(13): May or may not be conjugated to a chemical probe
RVVNIEGVDSNMCCGTHVSNLSDLQVIKI

SEQ ID NO: 8496 - protein, 20 aa, Homo sapiens
  Table 4 sequence identifier: Q04864_C524
  MOD_RES (12)..(12): May or may not be conjugated to a chemical probe
RLLSMNLENPSCNSVLDPRD

SEQ ID NO: 8497 - protein, 21 aa, Homo sapiens
  Table 4 sequence identifier: O75400_C39
  MOD_RES (8)..(8): May or may not be conjugated to a chemical probe
RLSGSSLCSGSWVSADGFLRR

SEQ ID NO: 8498 - protein, 22 aa, Homo sapiens
  Table 4 sequence identifier: P04150_C367
  MOD_RES (2)..(2): May or may not be conjugated to a chemical probe
RCQGSGDDNLTSLGTLNFPGRT

SEQ ID NO: 8499 - protein, 16 aa, Homo sapiens
  Table 4 sequence identifier: P33241_C283
  MOD_RES (5)..(5): May or may not be conjugated to a chemical probe
KTPSCKDIVAGDMSKK

SEQ ID NO: 8500 - protein, 22 aa, Homo sapiens
  Table 4 sequence identifier: O60934_C487
  MOD_RES (6)..(6): May or may not be conjugated to a chemical probe
RIETSCSLLEQTQPATPSLWKN

SEQ ID NO: 8501 - protein, 32 aa, Homo sapiens
  Table 4 sequence identifier: Q86W50_C448
  MOD_RES (12)..(12): May or may not be conjugated to a chemical probe
REGEAAAVEGPCPSQESLSQEENPEPTEDERS

SEQ ID NO: 8502 - protein, 14 aa, Homo sapiens
  Table 4 sequence identifier: Q9UQ35_C872
  MOD_RES (3)..(3): May or may not be conjugated to a chemical probe
RSCFESSPDPELKS

SEQ ID NO: 8503 - protein, 38 aa, Homo sapiens; identical to SEQ ID NO: 929
  Table 4 sequence identifier: Q8NDH3_C81
  MOD_RES (36)..(36): May or may not be conjugated to a chemical probe

SEQ ID NO: 8504 - protein, 15 aa, Homo sapiens
  Table 4 sequence identifier: O43815_C765
  MOD_RES (2)..(2): May or may not be conjugated to a chemical probe
KCYIASAGADALAKV

SEQ ID NO: 8505 - protein, 9 aa, Homo sapiens
  Table 4 sequence identifier: O15145_C162
  MOD_RES (5)..(5): May or may not be conjugated to a chemical probe
KWWTCFVKR

SEQ ID NO: 8506 - protein, 15 aa, Homo sapiens
  Table 4 sequence identifier: O15355_C164
  MOD_RES (6)..(6): May or may not be conjugated to a chemical probe
RYGQNCHKGPPHSKS

SEQ ID NO: 8507 - protein, 12 aa, Homo sapiens
  Table 4 sequence identifier: H3BQZ7_C308
  MOD_RES (4)..(4): May or may not be conjugated to a chemical probe
KEGCTEVSLLRV

SEQ ID NO: 8508 - protein, 12 aa, Homo sapiens
  Table 4 sequence identifier: Q1KMD3_C308
  MOD_RES (4)..(4): May or may not be conjugated to a chemical probe
KEGCTEVSLLRV

SEQ ID NO: 8509 - protein, 20 aa, Homo sapiens
  Table 4 sequence identifier: Q9NQ88_C114
  MOD_RES (4)..(4): May or may not be conjugated to a chemical probe
REECPVFTPPGGETLDQVKM

SEQ ID NO: 8510 - protein, 10 aa, Homo sapiens
  Table 4 sequence identifier: P23497_C309
  MOD_RES (4)..(4): May or may not be conjugated to a chemical probe
KVECQAQART

SEQ ID NO: 8511 - protein, 26 aa, Homo sapiens
  Table 4 sequence identifier: A2A288_C367
  MOD_RES (20)..(20): May or may not be conjugated to a chemical probe
RLAFSDDLGPLGPPLPVPACSLTPRL

SEQ ID NO: 8512 - protein, 18 aa, Homo sapiens
  Table 4 sequence identifier: Q9C0B6_C491
  MOD_RES (16)..(16): May or may not be conjugated to a chemical probe
RCGSCNPGYVLAQGLCRP

SEQ ID NO: 8513 - protein, 19 aa, Homo sapiens
  Table 4 sequence identifier: Q9UJW0_C258
  MOD_RES (11)..(11): May or may not be conjugated to a chemical probe
RLLQPDFQPVCASQLYPRH

SEQ ID NO: 8514 - protein, 14 aa, Homo sapiens
  Table 4 sequence identifier: P05771_C217
  MOD_RES (2)..(2): May or may not be conjugated to a chemical probe
KCSLNPEWNETFRF

SEQ ID NO: 8515 - protein, 13 aa, Homo sapiens
  Table 4 sequence identifier: Q96RS6_C376
  MOD_RES (6)..(6): May or may not be conjugated to a chemical probe
RDSAQCAAIAERL

SEQ ID NO: 8516 - protein, 12 aa, Homo sapiens
  Table 4 sequence identifier: Q8TD19_C878
  MOD_RES (8)..(8): May or may not be conjugated to a chemical probe
RLNPAVTCAGKG

SEQ ID NO: 8517 - protein, 9 aa, Homo sapiens
  Table 4 sequence identifier: O95786_C680
  MOD_RES (2)..(2): May or may not be conjugated to a chemical probe
KCILDAFKA

SEQ ID NO: 8518 - protein, 10 aa, Homo sapiens
  Table 4 sequence identifier: O94763_C44
  MOD_RES (6)..(6): May or may not be conjugated to a chemical probe
KVVTNCQERI

SEQ ID NO: 8519 - protein, 21 aa, Homo sapiens
  Table 4 sequence identifier: Q6PCB5_C280
  MOD_RES (7)..(7): May or may not be conjugated to a chemical probe
KSIQTICSGLLTDVEDQAAKG

SEQ ID NO: 8520 - protein, 21 aa, Homo sapiens
  Table 4 sequence identifier: Q09666_C1833
  MOD_RES (16)..(16): May or may not be conjugated to a chemical probe
KGPFVEAEVPDVDLECPDAKL

SEQ ID NO: 8521 - protein, 11 aa, Homo sapiens
  Table 4 sequence identifier: O95861_C42
  MOD_RES (3)..(3): May or may not be conjugated to a chemical probe
KTCATDLQTKA

SEQ ID NO: 8522 - protein, 22 aa, Homo sapiens
  Table 4 sequence identifier: Q96B23_C57
  MOD_RES (15)..(15): May or may not be conjugated to a chemical probe
KDGVADSTVISSMPCLLMELRR

SEQ ID NO: 8523 - protein, 22 aa, Homo sapiens
  Table 4 sequence identifier: Q9UER7_C699
  MOD_RES (15)..(15): May or may not be conjugated to a chemical probe
RVDSPSHGLVTSSLCIPSPARL

SEQ ID NO: 8524 - protein, 10 aa, Homo sapiens
  Table 4 sequence identifier: Q7Z6I6_C954
  MOD_RES (7)..(7): May or may not be conjugated to a chemical probe
KMPSAMCSKI

SEQ ID NO: 8525 - protein, 19 aa, Homo sapiens
  Table 4 sequence identifier: Q9P107_C335
  MOD_RES (9)..(9): May or may not be conjugated to a chemical probe
RAFAALAECCAPFEPGQRY

SEQ ID NO: 8526 - protein, 13 aa, Homo sapiens
  Table 4 sequence identifier: Q06323_C22
  MOD_RES (10)..(10): May or may not be conjugated to a chemical probe
KVDVFREDLCTKT

SEQ ID NO: 8527 - protein, 19 aa, Homo sapiens
  Table 4 sequence identifier: Q9P107_C336
  MOD_RES (10)..(10): May or may not be conjugated to a chemical probe
RAFAALAECCAPFEPGQRY

SEQ ID NO: 8528 - protein, 13 aa, Homo sapiens
  Table 4 sequence identifier: P35579_C569
  MOD_RES (5)..(5): May or may not be conjugated to a chemical probe
KADFCIIHYAGKV

SEQ ID NO: 8529 - protein, 24 aa, Homo sapiens
  Table 4 sequence identifier: P13489_C75
  MOD_RES (12)..(12): May or may not be conjugated to a chemical probe
RSNELGDVGVHCVLQGLQTPSCKI

SEQ ID NO: 8530 - protein, 17 aa, Homo sapiens
  Table 4 sequence identifier: Q9NY27_C22
  MOD_RES (4)..(4): May or may not be conjugated to a chemical probe
KEVCPVLDQFLCHVAKT

SEQ ID NO: 8531 - protein, 17 aa, Homo sapiens
  Table 4 sequence identifier: Q8NFH5_C255
  MOD_RES (2)..(2): May or may not be conjugated to a chemical probe
RCALSSPSLAFTPPIKT

SEQ ID NO: 8532 - protein, 24 aa, Homo sapiens
  Table 4 sequence identifier: P13489_C85
  MOD_RES (22)..(22): May or may not be conjugated to a chemical probe
RSNELGDVGVHCVLQGLQTPSCKI

SEQ ID NO: 8533 - protein, 18 aa, Homo sapiens
  Table 4 sequence identifier: Q00610_C870
  MOD_RES (6)..(6): May or may not be conjugated to a chemical probe
RIHEGCEEPATHNALAKI

SEQ ID NO: 8534 - protein, 12 aa, Homo sapiens
  Table 4 sequence identifier: O95071_C2267
  MOD_RES (2)..(2): May or may not be conjugated to a chemical probe
RCATTPMAVHRV

SEQ ID NO: 8535 - protein, 15 aa, Homo sapiens
  Table 4 sequence identifier: Q6NZY4_C393
  MOD_RES (11)..(11): May or may not be conjugated to a chemical probe
RIFGSIPMQACQQKD

SEQ ID NO: 8536 - protein, 30 aa, Homo sapiens
  Table 4 sequence identifier: A6QL63_C783
  MOD_RES (26)..(26): May or may not be conjugated to a chemical probe
KSDILSLEEILAEGTDLAETAPPPLCASRN

SEQ ID NO: 8537 - protein, 27 aa, Homo sapiens
  Table 4 sequence identifier: Q09666_C1900
  MOD_RES (22)..(22): May or may not be conjugated to a chemical probe
KLEGDLTGPSVGVEVPDVELECPDAKL

SEQ ID NO: 8538 - protein, 26 aa, Homo sapiens
  Table 4 sequence identifier: Q09161_C44
  MOD_RES (4)..(4): May or may not be conjugated to a chemical probe
KSACSLESNLEGLAGVLEADLPNYKS

SEQ ID NO: 8539 - protein, 32 aa, Homo sapiens; identical to SEQ ID NO: 5483
  Table 4 sequence identifier: Q5JSP0_C43
  MOD_RES (4)..(4): May or may not be conjugated to a chemical probe

SEQ ID NO: 8540 - protein, 24 aa, Homo sapiens
  Table 4 sequence identifier: Q14839_C1594
  MOD_RES (11)..(11): May or may not be conjugated to a chemical probe
KSTAPETAIECTQAPAPASEDEKV

SEQ ID NO: 8541 - protein, 17 aa, Homo sapiens
  Table 4 sequence identifier: Q16566_C202
  MOD_RES (4)..(4): May or may not be conjugated to a chemical probe
KTVCGTPGYCAPEILRG

SEQ ID NO: 8542 - protein, 20 aa, Homo sapiens
  Table 4 sequence identifier: Q8WTW3_C513
  MOD_RES (8)..(8): May or may not be conjugated to a chemical probe
KAQAISPCVQNFCSALDSKL

SEQ ID NO: 8543 - protein, 27 aa, Homo sapiens
  Table 4 sequence identifier: Q09666_C2162
  MOD_RES (22)..(22): May or may not be conjugated to a chemical probe
KLEGDLTGPSVDVEVPDVELECPDAKL

SEQ ID NO: 8544 - protein, 16 aa, Homo sapiens
  Table 4 sequence identifier: Q9HA64_C24
  MOD_RES (10)..(10): May or may not be conjugated to a chemical probe
RATGHSGGGCISQGRS

SEQ ID NO: 8545 - protein, 11 aa, Homo sapiens
  Table 4 sequence identifier: Q96E39_C338
  MOD_RES (8)..(8): May or may not be conjugated to a chemical probe
RSDLYSSCDRV

SEQ ID NO: 8546 - protein, 23 aa, Homo sapiens
  Table 4 sequence identifier: P35610_C92
  MOD_RES (10)..(10): May or may not be conjugated to a chemical probe
KSASLDNGGCALTTFSVLEGEKN

SEQ ID NO: 8547 - protein, 19 aa, Homo sapiens
  Table 4 sequence identifier: Q96T76_C549
  MOD_RES (16)..(16): May or may not be conjugated to a chemical probe
RVGESNLTNGDEPTQCSRH

SEQ ID NO: 8548 - protein, 24 aa, Homo sapiens
  Table 4 sequence identifier: Q9H4A3_C547
  MOD_RES (18)..(18): May or may not be conjugated to a chemical probe
RDVPEDVAQEMVESGYVCEGDHKT

SEQ ID NO: 8549 - protein, 24 aa, Homo sapiens
  Table 4 sequence identifier: Q7Z2T5_C320
  MOD_RES (19)..(19): May or may not be conjugated to a chemical probe
KVTINDLNENSVTLIQENCHLNKL

SEQ ID NO: 8550 - protein, 35 aa, Homo sapiens; identical to SEQ ID NO: 5860
  Table 4 sequence identifier: Q99996_C3868
  MOD_RES (24)..(24): May or may not be conjugated to a chemical probe

SEQ ID NO: 8551 - protein, 17 aa, Homo sapiens
  Table 4 sequence identifier: Q96RU3_C70
  MOD_RES (15)..(15): May or may not be conjugated to a chemical probe
KKNSKEEEEYKYTSCKA

SEQ ID NO: 8552 - protein, 13 aa, Homo sapiens
  Table 4 sequence identifier: Q9H9A6_C54
  MOD_RES (9)..(9): May or may not be conjugated to a chemical probe
RNLSEVPQCVWRI

SEQ ID NO: 8553 - protein, 24 aa, Homo sapiens
  Table 4 sequence identifier: O75569_C106
  MOD_RES (7)..(7): May or may not be conjugated to a chemical probe
KANASICFAVPDPLMPDPSKQPKN

SEQ ID NO: 8554 - protein, 21 aa, Homo sapiens
  Table 4 sequence identifier: P04150_C302
  MOD_RES (7)..(7): May or may not be conjugated to a chemical probe
KLGTVYCQASFPGANIIGNKM

SEQ ID NO: 8555 - protein, 29 aa, Homo sapiens
  Table 4 sequence identifier: Q9NUQ9_C10
  MOD_RES (5)..(5): May or may not be conjugated to a chemical probe
KVLTCTDLEQGPNFFLDFENAQPTESEKE

SEQ ID NO: 8556 - protein, 11 aa, Homo sapiens
  Table 4 sequence identifier: P20592_C707
  MOD_RES (5)..(5): May or may not be conjugated to a chemical probe
RHALCQFSSKE

SEQ ID NO: 8557 - protein, 16 aa, Homo sapiens
  Table 4 sequence identifier: Q8N5K1_C92
  MOD_RES (12)..(12): May or may not be conjugated to a chemical probe
KVVNEINIEDLCLTKA

SEQ ID NO: 8558 - protein, 52 aa, Homo sapiens
  Table 4 sequence identifier: O14497_C336
  MOD_RES (31)..(31): May or may not be conjugated to a chemical probe
RGYQGYPGGDYSGGPQDGGAGKGPADMASQCWGAAAAAAAAAAASGGAQQRS

SEQ ID NO: 8559 - protein, 31 aa, Homo sapiens; identical to SEQ ID NO: 3353
  Table 4 sequence identifier: O75694_C874
  MOD_RES (28)..(28): May or may not be conjugated to a chemical probe

SEQ ID NO: 8560 - protein, 17 aa, Homo sapiens
  Table 4 sequence identifier: Q5W0V3_C298
  MOD_RES (2)..(2): May or may not be conjugated to a chemical probe
KCLTQSTCLCELLTDRL

SEQ ID NO: 8561 - protein, 14 aa, Homo sapiens
  Table 4 sequence identifier: Q9NSD9_C195
  MOD_RES (6)..(6): May or may not be conjugated to a chemical probe
KEYTACELMNIYKT

SEQ ID NO: 8562 - protein, 17 aa, Homo sapiens
  Table 4 sequence identifier: P45984_C177
  MOD_RES (4)..(4): May or may not be conjugated to a chemical probe
RTACTNFMMTPYVVTRY

SEQ ID NO: 8563 - protein, 29 aa, Homo sapiens
  Table 4 sequence identifier: Q92835_C956
  MOD_RES (27)..(27): May or may not be conjugated to a chemical probe
KQTLSPDQQPTAWSYDQPPKDSPLGPCRG

SEQ ID NO: 8564 - protein, 22 aa, Homo sapiens
  Table 4 sequence identifier: Q96EV2_C726
  MOD_RES (2)..(2): May or may not be conjugated to a chemical probe
RCSATPSAQVKPIVSASPPSRA

SEQ ID NO: 8565 - protein, 24 aa, Homo sapiens
  Table 4 sequence identifier: P55198_C571
  MOD_RES (4)..(4): May or may not be conjugated to a chemical probe
RAVCSTPLSSSLLGPPGTSALPRL

SEQ ID NO: 8566 - protein, 17 aa, Homo sapiens
  Table 4 sequence identifier: O75475_C204
  MOD_RES (4)..(4): May or may not be conjugated to a chemical probe
KQPCPSESDIITEEDKS

SEQ ID NO: 8567 - protein, 20 aa, Homo sapiens
  Table 4 sequence identifier: P51812_C229
  MOD_RES (6)..(6): May or may not be conjugated to a chemical probe
KAYSFCGTVEYMAPEVVNRR

SEQ ID NO: 8568 - protein, 20 aa, Homo sapiens
  Table 4 sequence identifier: Q15418_C223
  MOD_RES (6)..(6): May or may not be conjugated to a chemical probe
KAYSFCGTVEYMAPEVVNRR

SEQ ID NO: 8569 - protein, 44 aa, Homo sapiens
  Table 4 sequence identifier: O94886_C791
  MOD_RES (28)..(28): May or may not be conjugated to a chemical probe
RTALSPQQQQQQTYGAIHNISGTIPGQCLAQSATGSVAAAPQEA

SEQ ID NO: 8570 - protein, 9 aa, Homo sapiens
  Table 4 sequence identifier: Q14005_C975
  MOD_RES (5)..(5): May or may not be conjugated to a chemical probe
RSQSCETKL

SEQ ID NO: 8571 - protein, 12 aa, Homo sapiens
  Table 4 sequence identifier: P13639_C41
  MOD_RES (10)..(10): May or may not be conjugated to a chemical probe
KSTLTDSLVCKA

SEQ ID NO: 8572 - protein, 11 aa, Homo sapiens
  Table 4 sequence identifier: Q63HN8_C310
  MOD_RES (4)..(4): May or may not be conjugated to a chemical probe
KTHCQEAETKT

SEQ ID NO: 8573 - protein, 30 aa, Homo sapiens
  Table 4 sequence identifier: Q96QD9_C242
  MOD_RES (22)..(22): May or may not be conjugated to a chemical probe
RTSTTNGGILTVSIDNPGAVQCPVTQKPRL

SEQ ID NO: 8574 - protein, 25 aa, Homo sapiens
  Table 4 sequence identifier: P07814_C744
  MOD_RES (12)..(12): May or may not be conjugated to a chemical probe
KERPTPSLNNNCTTSEDSLVLYNRV

SEQ ID NO: 8575 - protein, 15 aa, Homo sapiens
  Table 4 sequence identifier: Q9UKT9_C434
  MOD_RES (12)..(12): May or may not be conjugated to a chemical probe
RSYELLKPPPICPRD

SEQ ID NO: 8576 - protein, 11 aa, Homo sapiens
  Table 4 sequence identifier: Q8TC07_C197
  MOD_RES (7)..(7): May or may not be conjugated to a chemical probe
RTLLVNCQNKS

SEQ ID NO: 8577 - protein, 22 aa, Homo sapiens
  Table 4 sequence identifier: Q96RU3_C511
  MOD_RES (17)..(17): May or may not be conjugated to a chemical probe
RQSGLYDSQNPPTVNNCAQDRE

SEQ ID NO: 8578 - protein, 13 aa, Homo sapiens
  Table 4 sequence identifier: Q9NUP9_C47
  MOD_RES (8)..(8): May or may not be conjugated to a chemical probe
RVLQSEFCNAVRE

SEQ ID NO: 8579 - protein, 27 aa, Homo sapiens
  Table 4 sequence identifier: Q9ULP9_C89
  MOD_RES (6)..(6): May or may not be conjugated to a chemical probe
KHSSSCLPLPEFVDNTQVPSYCLNARG

SEQ ID NO: 8580 - protein, 27 aa, Homo sapiens
  Table 4 sequence identifier: H3BQ06_C89
  MOD_RES (6)..(6): May or may not be conjugated to a chemical probe
KHSSSCLPLPEFVDNTQVPSYCLNARG

SEQ ID NO: 8581 - protein, 33 aa, Homo sapiens; identical to SEQ ID NO: 4707
  Table 4 sequence identifier: P28702_C340
  MOD_RES (27)..(27): May or may not be conjugated to a chemical probe

SEQ ID NO: 8582 - protein, 24 aa, Homo sapiens
  Table 4 sequence identifier: Q9UL15_C327
  MOD_RES (21)..(21): May or may not be conjugated to a chemical probe
KTELQGLIGQLDEVSLEKNPCIRE

SEQ ID NO: 8583 - protein, 25 aa, Homo sapiens
  Table 4 sequence identifier: O95817_C179
  MOD_RES (10)..(10): May or may not be conjugated to a chemical probe
RSQSPAASDCSSSSSSASLPSSGRS

SEQ ID NO: 8584 - protein, 24 aa, Homo sapiens
  Table 4 sequence identifier: Q86UT6_C331
  MOD_RES (7)..(7): May or may not be conjugated to a chemical probe
RLNQPYCGYAVGGSGVSATPAQRD

SEQ ID NO: 8585 - protein, 12 aa, Homo sapiens
  Table 4 sequence identifier: Q96PE3_C854
  MOD_RES (5)..(5): May or may not be conjugated to a chemical probe
RSQTCLPELLRF

SEQ ID NO: 8586 - protein, 26 aa, Homo sapiens
  Table 4 sequence identifier: P57764_C268
  MOD_RES (2)..(2): May or may not be conjugated to a chemical probe
RCLHNFLTDGVPAEGAFTEDFQGLRA

SEQ ID NO: 8587 - protein, 18 aa, Homo sapiens
  Table 4 sequence identifier: Q99873_C109
  MOD_RES (8)..(8): May or may not be conjugated to a chemical probe
RKVIGIECSSISDYAVKI

SEQ ID NO: 8588 - protein, 17 aa, Homo sapiens
  Table 4 sequence identifier: P49589_C27
  MOD_RES (15)..(15): May or may not be conjugated to a chemical probe
RVQPQWSPPAGTQPCRL

SEQ ID NO: 8589 - protein, 20 aa, Homo sapiens
  Table 4 sequence identifier: P53384_C31
  MOD_RES (3)..(3): May or may not be conjugated to a chemical probe
RLCASGAGATPDTAIEEIKE

SEQ ID NO: 8590 - protein, 14 aa, Homo sapiens
  Table 4 sequence identifier: O95644_C228
  MOD_RES (6)..(6): May or may not be conjugated to a chemical probe
RGLGACTLLGSPRH

SEQ ID NO: 8591 - protein, 27 aa, Homo sapiens
  Table 4 sequence identifier: Q9UPN7_C795
  MOD_RES (9)..(9): May or may not be conjugated to a chemical probe
KVTEPSAPCQALVSIGDLQATFHGIRS

SEQ ID NO: 8592 - protein, 17 aa, Homo sapiens
  Table 4 sequence identifier: Q93008_C673
  MOD_RES (11)..(11): May or may not be conjugated to a chemical probe
FAFKDGQLWLCAPQAKQ

SEQ ID NO: 8593 - protein, 17 aa, Homo sapiens
  Table 4 sequence identifier: O00507_C674
  MOD_RES (11)..(11): May or may not be conjugated to a chemical probe
FAFKDGQLWLCAPQAKQ

SEQ ID NO: 8594 - protein, 19 aa, Homo sapiens
  Table 4 sequence identifier: Q9UHI6_C577
  MOD_RES (13)..(13): May or may not be conjugated to a chemical probe
KEALPVSLPQIPCLSSFKI

SEQ ID NO: 8595 - protein, 23 aa, Homo sapiens
  Table 4 sequence identifier: Q09666_C108
  MOD_RES (7)..(7): May or may not be conjugated to a chemical probe
REVFSSCSSEVVLSGDDEEYQRI

SEQ ID NO: 8596 - protein, 14 aa, Homo sapiens
  Table 4 sequence identifier: O43290_C674
  MOD_RES (9)..(9): May or may not be conjugated to a chemical probe
KSLPSAVYCIEDKM

SEQ ID NO: 8597 - protein, 24 aa, Homo sapiens
  Table 4 sequence identifier: Q2NL82_C126
  MOD_RES (21)..(21): May or may not be conjugated to a chemical probe
RDTGTVHLNELGNTQNFMLLCPRL

SEQ ID NO: 8598 - protein, 9 aa, Homo sapiens
  Table 4 sequence identifier: Q9UPN3_C4825
  MOD_RES (3)..(3): May or may not be conjugated to a chemical probe
KNCPISAKL

SEQ ID NO: 8599 - protein, 26 aa, Homo sapiens
  Table 4 sequence identifier: Q13588_C161
  MOD_RES (6)..(6): May or may not be conjugated to a chemical probe
KSPGACFAQAQFDFSAQDPSQLSFRR

SEQ ID NO: 8600 - protein, 11 aa, Homo sapiens
  Table 4 sequence identifier: Q9UG22_C227
  MOD_RES (2)..(2): May or may not be conjugated to a chemical probe
KCGPVGSDERV

SEQ ID NO: 8601 - protein, 50 aa, Homo sapiens; identical to SEQ ID NO: 3018
  Table 4 sequence identifier: I3L420_C73
  MOD_RES (11)..(11): May or may not be conjugated to a chemical probe

SEQ ID NO: 8602 - protein, 50 aa, Homo sapiens; identical to SEQ ID NO: 3018
  Table 4 sequence identifier: Q8ND56_C78
  MOD_RES (11)..(11): May or may not be conjugated to a chemical probe

SEQ ID NO: 8603 - protein, 19 aa, Homo sapiens
  Table 4 sequence identifier: Q96CM8_C64
  MOD_RES (16)..(16): May or may not be conjugated to a chemical probe
RMVSTPIGGLSYVQGCTKK

SEQ ID NO: 8604 - protein, 31 aa, Homo sapiens; identical to SEQ ID NO: 2692
  Table 4 sequence identifier: Q6Y7W6_C938
  MOD_RES (17)..(17): May or may not be conjugated to a chemical probe

SEQ ID NO: 8605 - protein, 14 aa, Homo sapiens
  Table 4 sequence identifier: Q9HB58_C327
  MOD_RES (6)..(6): May or may not be conjugated to a chemical probe
KDDSTCNSTVETRA

SEQ ID NO: 8606 - protein, 42 aa, Homo sapiens; identical to SEQ ID NO: 5201
  Table 4 sequence identifier: Q9UGP4_C374
  MOD_RES (33)..(33): May or may not be conjugated to a chemical probe

SEQ ID NO: 8607 - protein, 13 aa, Homo sapiens
  Table 4 sequence identifier: P49458_C48
  MOD_RES (8)..(8): May or may not be conjugated to a chemical probe
KVTDDLVCLVYKT

SEQ ID NO: 8608 - protein, 16 aa, Homo sapiens
  Table 4 sequence identifier: O43566_C496
  MOD_RES (4)..(4): May or may not be conjugated to a chemical probe
RQTCDIEGLVELLNRV

SEQ ID NO: 8609 - protein, 18 aa, Homo sapiens
  Table 4 sequence identifier: P21333_C717
  MOD_RES (10)..(10): May or may not be conjugated to a chemical probe
RVQVQDNEGCPVEALVKD

SEQ ID NO: 8610 - protein, 16 aa, Homo sapiens
  Table 4 sequence identifier: Q9NZB2_C279
  MOD_RES (10)..(10): May or may not be conjugated to a chemical probe
RAHQLVLPPCDVVIKA

SEQ ID NO: 8611 - protein, 14 aa, Homo sapiens
  Table 4 sequence identifier: Q96EB1_C218
  MOD_RES (5)..(5): May or may not be conjugated to a chemical probe
KVEPCSLTPGYTKL

SEQ ID NO: 8612 - protein, 12 aa, Homo sapiens
  Table 4 sequence identifier: O43149_C2312
  MOD_RES (7)..(7): May or may not be conjugated to a chemical probe
KGGGQECGDSRA

SEQ ID NO: 8613 - protein, 26 aa, Homo sapiens
  Table 4 sequence identifier: Q0VD83_C844
  MOD_RES (14)..(14): May or may not be conjugated to a chemical probe
RVEAEESAGAEDSCGLDPAGSQTARA

SEQ ID NO: 8614 - protein, 29 aa, Homo sapiens
  Table 4 sequence identifier: Q00537_C127
  MOD_RES (26)..(26): May or may not be conjugated to a chemical probe
KMGSDGESDQASGTSSDEVQSPTGVCLRN

SEQ ID NO: 8615 - protein, 23 aa, Homo sapiens
  Table 4 sequence identifier: Q9UJY4_C429
  MOD_RES (14)..(14): May or may not be conjugated to a chemical probe
RNLLDLLSAQPAPCPLNYVSQKS

SEQ ID NO: 8616 - protein, 27 aa, Homo sapiens
  Table 4 sequence identifier: Q03519_C641
  MOD_RES (16)..(16): May or may not be conjugated to a chemical probe
RVLILDEATSALDVQCEQALQDWNSRG

SEQ ID NO: 8617 - protein, 16 aa, Homo sapiens
  Table 4 sequence identifier: Q9P2X3_C195
  MOD_RES (13)..(13): May or may not be conjugated to a chemical probe
RSTFQAHLAPVVCPKQ

SEQ ID NO: 8618 - protein, 13 aa, Homo sapiens
  Table 4 sequence identifier: P42166_C684
  MOD_RES (11)..(11): May or may not be conjugated to a chemical probe
KGGTLFGGEVCKV

SEQ ID NO: 8619 - protein, 33 aa, Homo sapiens; identical to SEQ ID NO: 3212
  Table 4 sequence identifier: Q5GLZ8_C392
  MOD_RES (27)..(27): May or may not be conjugated to a chemical probe

SEQ ID NO: 8620 - protein, 10 aa, Homo sapiens
  Table 4 sequence identifier: Q9H832_C100
  MOD_RES (6)..(6): May or may not be conjugated to a chemical probe
RTAPQCLLRI

SEQ ID NO: 8621 - protein, 9 aa, Homo sapiens
  Table 4 sequence identifier: P36969_C93
  MOD_RES (5)..(5): May or may not be conjugated to a chemical probe
RYAECGLRI

SEQ ID NO: 8622 - protein, 16 aa, Homo sapiens
  Table 4 sequence identifier: Q9NVG8_C36
  MOD_RES (10)..(10): May or may not be conjugated to a chemical probe
RELSFSGIPCEGGLRC

SEQ ID NO: 8623 - protein, 16 aa, Homo sapiens
  Table 4 sequence identifier: O75348_C69
  MOD_RES (4)..(4): May or may not be conjugated to a chemical probe
RGSCSTEVEKETQEKM

SEQ ID NO: 8624 - protein, 23 aa, Homo sapiens
  Table 4 sequence identifier: Q99575_C705
  MOD_RES (9)..(9): May or may not be conjugated to a chemical probe
KLGTLAPFCCPWEQLTQDWESRV

SEQ ID NO: 8625 - protein, 14 aa, Homo sapiens
  Table 4 sequence identifier: O75369_C2501
  MOD_RES (7)..(7): May or may not be conjugated to a chemical probe
RSSTETCYSAIPKA

SEQ ID NO: 8626 - protein, 18 aa, Homo sapiens
  Table 4 sequence identifier: P50851_C2675
  MOD_RES (2)..(2): May or may not be conjugated to a chemical probe
KCSGIGDNPGSETAAPRA

SEQ ID NO: 8627 - protein, 23 aa, Homo sapiens
  Table 4 sequence identifier: Q99575_C706
  MOD_RES (10)..(10): May or may not be conjugated to a chemical probe
KLGTLAPFCCPWEQLTQDWESRV

SEQ ID NO: 8628 - protein, 22 aa, Homo sapiens
  Table 4 sequence identifier: Q99704_C115
  MOD_RES (20)..(20): May or may not be conjugated to a chemical probe
RSHLLAADAPSSAAWVQTLCRN

SEQ ID NO: 8629 - protein, 13 aa, Homo sapiens
  Table 4 sequence identifier: Q05086_C108
  MOD_RES (8)..(8): May or may not be conjugated to a chemical probe
KGAPNNSCSEIKM

SEQ ID NO: 8630 - protein, 12 aa, Homo sapiens
  Table 4 sequence identifier: Q15052_C553
  MOD_RES (6)..(6): May or may not be conjugated to a chemical probe
RGPASCSSLSKT

SEQ ID NO: 8631 - protein, 19 aa, Homo sapiens
  Table 4 sequence identifier: Q9C0B7_C286
  MOD_RES (14)..(14): May or may not be conjugated to a chemical probe
RELLILQGGPPQSCTDVKT

SEQ ID NO: 8632 - protein, 26 aa, Homo sapiens
  Table 4 sequence identifier: Q9Y2X7_C576
  MOD_RES (19)..(19): May or may not be conjugated to a chemical probe
KGVSASAVPFTPSSPLLSCSQEGSRH

SEQ ID NO: 8633 - protein, 11 aa, Homo sapiens
  Table 4 sequence identifier: Q66PJ3_C349
  MOD_RES (4)..(4): May or may not be conjugated to a chemical probe
RGDCLAFQMRA

SEQ ID NO: 8634 - protein, 18 aa, Homo sapiens
  Table 4 sequence identifier: Q99497_C46
  MOD_RES (15)..(15): May or may not be conjugated to a chemical probe
KVTVAGLAGKDPVQCSRD

SEQ ID NO: 8635 - protein, 28 aa, Homo sapiens
  Table 4 sequence identifier: Q9UIS9_C525
  MOD_RES (24)..(24): May or may not be conjugated to a chemical probe
KADTQDEWTPGTAVLTSPVLVPGCPSKA

SEQ ID NO: 8636 - protein, 13 aa, Homo sapiens
  Table 4 sequence identifier: Q8IWX8_C69
  MOD_RES (11)..(11): May or may not be conjugated to a chemical probe
KLALEQQQLICKQ

SEQ ID NO: 8637 - protein, 34 aa, Homo sapiens; identical to SEQ ID NO: 3967
  Table 4 sequence identifier: Q00577_C292
  MOD_RES (4)..(4): May or may not be conjugated to a chemical probe

SEQ ID NO: 8638 - protein, 11 aa, Homo sapiens
  Table 4 sequence identifier: P62249_C25
  MOD_RES (9)..(9): May or may not be conjugated to a chemical probe
KTATAVAHCKR

SEQ ID NO: 8639 - protein, 26 aa, Homo sapiens
  Table 4 sequence identifier: Q9UJX3_C131
  MOD_RES (17)..(17): May or may not be conjugated to a chemical probe
KVRPSTGNSASTPQSQCLPSEIEVKY

SEQ ID NO: 8640 - protein, 14 aa, Homo sapiens
  Table 4 sequence identifier: Q5VTL8_C113
  MOD_RES (9)..(9): May or may not be conjugated to a chemical probe
KTAGQTGMCGGVRG

SEQ ID NO: 8641 - protein, 18 aa, Homo sapiens
  Table 4 sequence identifier: P47756_C206
  MOD_RES (8)..(8): May or may not be conjugated to a chemical probe
KDETVSDCSPHIANIGRL

SEQ ID NO: 8642 - protein, 22 aa, Homo sapiens
  Table 4 sequence identifier: Q562E7_C198
  MOD_RES (16)..(16): May or may not be conjugated to a chemical probe
RVYGCSFLPVGETTQCPSYARE

SEQ ID NO: 8643 - protein, 12 aa, Homo sapiens
  Table 4 sequence identifier: Q8IV50_C106
  MOD_RES (7)..(7): May or may not be conjugated to a chemical probe
KLFTNDCIFLKK

SEQ ID NO: 8644 - protein, 23 aa, Homo sapiens
  Table 4 sequence identifier: Q96F15_C171
  MOD_RES (19)..(19): May or may not be conjugated to a chemical probe
KEDLGGQALDDYVANTDNCSLKD

SEQ ID NO: 8645 - protein, 27 aa, Homo sapiens
  Table 4 sequence identifier: Q9P253_C22
  MOD_RES (9)..(9): May or may not be conjugated to a chemical probe
RSAVLQPGCPSVGIPHSGYVNAQLEKE

SEQ ID NO: 8646 - protein, 22 aa, Homo sapiens
  Table 4 sequence identifier: Q562E7_C187
  MOD_RES (5)..(5): May or may not be conjugated to a chemical probe
RVYGCSFLPVGETTQCPSYARE

SEQ ID NO: 8647 - protein, 46 aa, Homo sapiens; identical to SEQ ID NO: 4522
  Table 4 sequence identifier: Q6KC79_C419
  MOD_RES (18)..(18): May or may not be conjugated to a chemical probe

SEQ ID NO: 8648 - protein, 28 aa, Homo sapiens
  Table 4 sequence identifier: Q9BSJ8_C635
  MOD_RES (12)..(12): May or may not be conjugated to a chemical probe
RGSSVDAPPRPCHTTPDSQFGTEHVLRI

SEQ ID NO: 8649 - protein, 25 aa, Homo sapiens
  Table 4 sequence identifier: Q14980_C160
  MOD_RES (8)..(8): May or may not be conjugated to a chemical probe
KAPVPSTCSSTFPEELSPPSHQAKR

SEQ ID NO: 8650 - protein, 21 aa, Homo sapiens
  Table 4 sequence identifier: O00571_C128
  MOD_RES (3)..(3): May or may not be conjugated to a chemical probe
RWCDKSDEDDWSKPLPPSERL

SEQ ID NO: 8651 - protein, 35 aa, Homo sapiens; identical to SEQ ID NO: 5765
  Table 4 sequence identifier: Q96FZ5_C12
  MOD_RES (4)..(4): May or may not be conjugated to a chemical probe

SEQ ID NO: 8652 - protein, 14 aa, Homo sapiens
  Table 4 sequence identifier: Q8TCU6_C52
  MOD_RES (3)..(3): May or may not be conjugated to a chemical probe
RLCVLNEILGTERD

SEQ ID NO: 8653 - protein, 11 aa, Homo sapiens
  Table 4 sequence identifier: Q9Y6K9_C131
  MOD_RES (2)..(2): May or may not be conjugated to a chemical probe
RCQQQMAEDKA

SEQ ID NO: 8654 - protein, 19 aa, Homo sapiens
  Table 4 sequence identifier: O14497_C1968
  MOD_RES (7)..(7): May or may not be conjugated to a chemical probe
KDETPLCTLLDWQDSLAKR

SEQ ID NO: 8655 - protein, 9 aa, Homo sapiens
  Table 4 sequence identifier: Q9NYF8_C688
  MOD_RES (2)..(2): May or may not be conjugated to a chemical probe
RCDSADLRH

SEQ ID NO: 8656 - protein, 18 aa, Homo sapiens
  Table 4 sequence identifier: Q96SK2_C301
  MOD_RES (6)..(6): May or may not be conjugated to a chemical probe
RSQAPCANKDEADLSSKQ

SEQ ID NO: 8657 - protein, 9 aa, Homo sapiens
  Table 4 sequence identifier: Q15424_C519
  MOD_RES (6)..(6): May or may not be conjugated to a chemical probe
KRDDKCDRK

SEQ ID NO: 8658 - protein, 15 aa, Homo sapiens
  Table 4 sequence identifier: P52564_C38
  MOD_RES (3)..(3): May or may not be conjugated to a chemical probe
KACISIGNQNFEVKA

SEQ ID NO: 8659 - protein, 17 aa, Homo sapiens
  Table 4 sequence identifier: P08575_C398
  MOD_RES (15)..(15): May or may not be conjugated to a chemical probe
KTDFGSPGEPQIIFCRS

SEQ ID NO: 8660 - protein, 13 aa, Homo sapiens
  Table 4 sequence identifier: Q9NUW8_C135
  MOD_RES (10)..(10): May or may not be conjugated to a chemical probe
RTENHGAPACHRL

SEQ ID NO: 8661 - protein, 17 aa, Homo sapiens
  Table 4 sequence identifier: E9PMF8_C332
  MOD_RES (15)..(15): May or may not be conjugated to a chemical probe
KTDFGSPGEPQIIFCRS

SEQ ID NO: 8662 - protein, 18 aa, Homo sapiens
  Table 4 sequence identifier: Q9Y4W2_C140
  MOD_RES (2)..(2): May or may not be conjugated to a chemical probe
KCLAQEVNIPDWIVDLRH

SEQ ID NO: 8663 - protein, 17 aa, Homo sapiens
  Table 4 sequence identifier: P04843_C477
  MOD_RES (4)..(4): May or may not be conjugated to a chemical probe
KVACITEQVLTLVNKRI

SEQ ID NO: 8664 - protein, 27 aa, Homo sapiens
  Table 4 sequence identifier: Q9UFC0_C249
  MOD_RES (3)..(3): May or may not be conjugated to a chemical probe
RACASPSAQVEGSPVAGSDGSQPAVKL

SEQ ID NO: 8665 - protein, 10 aa, Homo sapiens
  Table 4 sequence identifier: Q9NUW8_C48
  MOD_RES (4)..(4): May or may not be conjugated to a chemical probe
RYTCSEAQKA

SEQ ID NO: 8666 - protein, 21 aa, Homo sapiens
  Table 4 sequence identifier: Q15052_C564
  MOD_RES (7)..(7): May or may not be conjugated to a chemical probe
KTSSSSCSAHSSFSSTGQPRG

SEQ ID NO: 8667 - protein, 10 aa, Homo sapiens
  Table 4 sequence identifier: Q02543_C22
  MOD_RES (2)..(2): May or may not be conjugated to a chemical probe
KCHTPPLYRM

SEQ ID NO: 8668 - protein, 17 aa, Homo sapiens
  Table 4 sequence identifier: A0FGR8_C181
  MOD_RES (3)..(3): May or may not be conjugated to a chemical probe
RACDLPAWVHFPDTERA

SEQ ID NO: 8669 - protein, 21 aa, Homo sapiens
  Table 4 sequence identifier: Q9BTA9_C553
  MOD_RES (4)..(4): May or may not be conjugated to a chemical probe
RSTCSLTPALAAHFSENLIKH

SEQ ID NO: 8670 - protein, 16 aa, Homo sapiens
  Table 4 sequence identifier: Q14980_C961
  MOD_RES (4)..(4): May or may not be conjugated to a chemical probe
RQFCSTQAALQAMERE

SEQ ID NO: 8671 - protein, 14 aa, Homo sapiens
  Table 4 sequence identifier: Q9BUH6_C180
  MOD_RES (2)..(2): May or may not be conjugated to a chemical probe
RCPGESLINPGFKS

SEQ ID NO: 8672 - protein, 17 aa, Homo sapiens
  Table 4 sequence identifier: P43250_C138
  MOD_RES (7)..(7): May or may not be conjugated to a chemical probe
RLEQGPCKDLFQELTRL

SEQ ID NO: 8673 - protein, 19 aa, Homo sapiens
  Table 4 sequence identifier: Q15185_C58
  MOD_RES (11)..(11): May or may not be conjugated to a chemical probe
KHLNEIDLFHCIDPNDSKH

SEQ ID NO: 8674 - protein, 20 aa, Homo sapiens
  Table 4 sequence identifier: Q8N4N3_C523
  MOD_RES (14)..(14): May or may not be conjugated to a chemical probe
RFDVLGVEAYSPQCNQWTRV

SEQ ID NO: 8675 - protein, 13 aa, Homo sapiens
  Table 4 sequence identifier: Q15669_C165
  MOD_RES (9)..(9): May or may not be conjugated to a chemical probe
RGVQQVFECAVRT

SEQ ID NO: 8676 - protein, 21 aa, Homo sapiens
  Table 4 sequence identifier: Q9NZT2_C443
  MOD_RES (19)..(19): May or may not be conjugated to a chemical probe
RTGTQEVGGQDPGEAVQPCRQ

SEQ ID NO: 8677 - protein, 33 aa, Homo sapiens; identical to SEQ ID NO: 4579
  Table 4 sequence identifier: Q13542_C35
  MOD_RES (16)..(16): May or may not be conjugated to a chemical probe

SEQ ID NO: 8678 - protein, 20 aa, Homo sapiens
  Table 4 sequence identifier: Q15669_C108
  MOD_RES (6)..(6): May or may not be conjugated to a chemical probe
RSNLPCTPVLVVATQTDQRE

SEQ ID NO: 8679 - protein, 14 aa, Homo sapiens
  Table 4 sequence identifier: Q92835_C138
  MOD_RES (10)..(10): May or may not be conjugated to a chemical probe
RNIPLTASSCEAKE

SEQ ID NO: 8680 - protein, 29 aa, Homo sapiens
  Table 4 sequence identifier: Q6PKG0_C864
  MOD_RES (21)..(21): May or may not be conjugated to a chemical probe
RTASISSSPSEGTPTVGSYGCTPQSLPKF

SEQ ID NO: 8681 - protein, 27 aa, Homo sapiens
  Table 4 sequence identifier: Q9Y679_C391
  MOD_RES (4)..(4): May or may not be conjugated to a chemical probe
KTGCVDLTITNLLEGAVAFMPEDITKG

SEQ ID NO: 8682 - protein, 14 aa, Homo sapiens
  Table 4 sequence identifier: P36542_C103
  MOD_RES (4)..(4): May or may not be conjugated to a chemical probe
RGLCGAIHSSIAKQ

SEQ ID NO: 8683 - protein, 22 aa, Homo sapiens
  Table 4 sequence identifier: Q01664_C29
  MOD_RES (8)..(8): May or may not be conjugated to a chemical probe
KEVIGGLCSLANIPLTPETQRD

SEQ ID NO: 8684 - protein, 12 aa, Homo sapiens
  Table 4 sequence identifier: P38606_C138
  MOD_RES (10)..(10): May or may not be conjugated to a chemical probe
RDIKWDFTPCKN

SEQ ID NO: 8685 - protein, 11 aa, Homo sapiens
  Table 4 sequence identifier: Q9Y520_C223
  MOD_RES (4)..(4): May or may not be conjugated to a chemical probe
RIACGPPQAKL

SEQ ID NO: 8686 - protein, 26 aa, Homo sapiens
  Table 4 sequence identifier: Q7Z2Z2_C474
  MOD_RES (23)..(23): May or may not be conjugated to a chemical probe
KLAAAQGQAPLEPTQDGSAIETCPKG

SEQ ID NO: 8687 - protein, 37 aa, Homo sapiens; identical to SEQ ID NO: 95
  Table 4 sequence identifier: O15294_C758
  MOD_RES (2)..(2): May or may not be conjugated to a chemical probe

SEQ ID NO: 8688 - protein, 12 aa, Homo sapiens
  Table 4 sequence identifier: Q96S59_C638
  MOD_RES (3)..(3): May or may not be conjugated to a chemical probe
RDCGKNTANKKM

SEQ ID NO: 8689 - protein, 18 aa, Homo sapiens
  Table 4 sequence identifier: O00541_C272
  MOD_RES (14)..(14): May or may not be conjugated to a chemical probe
KAGEGTYALDSESCMEKL

SEQ ID NO: 8690 - protein, 13 aa, Homo sapiens
  Table 4 sequence identifier: Q15020_C670
  MOD_RES (2)..(2): May or may not be conjugated to a chemical probe
KCAAVDVEPPSKQ

SEQ ID NO: 8691 - protein, 18 aa, Homo sapiens
  Table 4 sequence identifier: Q8NF91_C8703
  MOD_RES (2)..(2): May or may not be conjugated to a chemical probe
KCSLSQPGPSVSSPHSRS

SEQ ID NO: 8692 - protein, 28 aa, Homo sapiens
  Table 4 sequence identifier: Q14966_C1279
  MOD_RES (13)..(13): May or may not be conjugated to a chemical probe
KNETVSEILPSTCIVTLVPGIPTGDEKT

SEQ ID NO: 8693 - protein, 19 aa, Homo sapiens
  Table 4 sequence identifier: Q96C19_C172
  MOD_RES (14)..(14): May or may not be conjugated to a chemical probe
KAAAGELQEDSGLCVLARL

SEQ ID NO: 8694 - protein, 19 aa, Homo sapiens
  Table 4 sequence identifier: O75688_C172
  MOD_RES (15)..(15): May or may not be conjugated to a chemical probe
RNGQVCFSTQDHKPCNPRE

SEQ ID NO: 8695 - protein, 10 aa, Homo sapiens
  Table 4 sequence identifier: Q05519_C455
  MOD_RES (5)..(5): May or may not be conjugated to a chemical probe
KTKECSVEKG

SEQ ID NO: 8696 - protein, 16 aa, Homo sapiens
  Table 4 sequence identifier: P42331_C448
  MOD_RES (2)..(2): May or may not be conjugated to a chemical probe
KCFLTSAFQGANSSKM

SEQ ID NO: 8697 - protein, 13 aa, Homo sapiens
  Table 4 sequence identifier: P57075_C371
  MOD_RES (2)..(2): May or may not be conjugated to a chemical probe
RCSGEFLPQTARS

SEQ ID NO: 8698 - protein, 22 aa, Homo sapiens
  Table 4 sequence identifier: Q96GX2_C75
  MOD_RES (5)..(5): May or may not be conjugated to a chemical probe
RLPLCSLPGEPGNGPDQQLQRS

SEQ ID NO: 8699 - protein, 22 aa, Homo sapiens
  Table 4 sequence identifier: Q14690_C361
  MOD_RES (4)..(4): May or may not be conjugated to a chemical probe
RLSCQNLGAVLDDVPVQGFFKK

SEQ ID NO: 8700 - protein, 11 aa, Homo sapiens
  Table 4 sequence identifier: Q15149_C4494
  MOD_RES (4)..(4): May or may not be conjugated to a chemical probe
KAFCGFEDPRT

SEQ ID NO: 8701 - protein, 28 aa, Homo sapiens
  Table 4 sequence identifier: Q9NP31_C34
  MOD_RES (3)..(3): May or may not be conjugated to a chemical probe
RSCQNLGYTAASPQAPEAASNTGNAERA

SEQ ID NO: 8702 - protein, 13 aa, Homo sapiens
  Table 4 sequence identifier: P30519_C282
  MOD_RES (9)..(9): May or may not be conjugated to a chemical probe
KGALEGSSCPFRT

SEQ ID NO: 8703 - protein, 17 aa, Homo sapiens
  Table 4 sequence identifier: P98171_C855
  MOD_RES (2)..(2): May or may not be conjugated to a chemical probe
RCLVPASPEQHVEVDKA

SEQ ID NO: 8704 - protein, 45 aa, Homo sapiens
  Table 4 sequence identifier: I3L420_C80
  MOD_RES (13)..(13): May or may not be conjugated to a chemical probe
KDLTVCEPPKPQCSLPQDPAIVQSSLGSSTSSFQSMGSYGPFGRM

SEQ ID NO: 8705 - protein, 45 aa, Homo sapiens; identical to SEQ ID NO: 8704
  Table 4 sequence identifier: Q8ND56_C85
  MOD_RES (13)..(13): May or may not be conjugated to a chemical probe

SEQ ID NO: 8706 - protein, 17 aa, Homo sapiens
  Table 4 sequence identifier: P21580_C590
  MOD_RES (10)..(10): May or may not be conjugated to a chemical probe
RAGNDAPAGCLSQAART

SEQ ID NO: 8707 - protein, 16 aa, Homo sapiens
  Table 4 sequence identifier: O14618_C244
  MOD_RES (4)..(4): May or may not be conjugated to a chemical probe
KQICSCDGLTIWEERG

SEQ ID NO: 8708 - protein, 29 aa, Homo sapiens
  Table 4 sequence identifier: Q06124_C573
  MOD_RES (24)..(24): May or may not be conjugated to a chemical probe
KYSLADQTSGDQSPLPPCTPTPPCAEMRE

SEQ ID NO: 8709 - protein, 12 aa, Homo sapiens
  Table 4 sequence identifier: P08240_C253
  MOD_RES (8)..(8): May or may not be conjugated to a chemical probe
RVWELGGCANKE

SEQ ID NO: 8710 - protein, 16 aa, Homo sapiens
  Table 4 sequence identifier: O14618_C246
  MOD_RES (6)..(6): May or may not be conjugated to a chemical probe
KQICSCDGLTIWEERG

SEQ ID NO: 8711 - protein, 30 aa, Homo sapiens; identical to SEQ ID NO: 2836
  Table 4 sequence identifier: Q9H2M9_C67
  MOD_RES (28)..(28): May or may not be conjugated to a chemical probe

SEQ ID NO: 8712 - protein, 29 aa, Homo sapiens
  Table 4 sequence identifier: Q06124_C567
  MOD_RES (18)..(18): May or may not be conjugated to a chemical probe
KYSLADQTSGDQSPLPPCTPTPPCAEMRE

SEQ ID NO: 8713 - protein, 16 aa, Homo sapiens
  Table 4 sequence identifier: O43865_C272
  MOD_RES (3)..(3): May or may not be conjugated to a chemical probe
KLCVPAMNVNDSVTKQ

SEQ ID NO: 8714 - protein, 16 aa, Homo sapiens
  Table 4 sequence identifier: Q96HN2_C353
  MOD_RES (3)..(3): May or may not be conjugated to a chemical probe
KLCVPAMNVNDSVTKQ

SEQ ID NO: 8715 - protein, 21 aa, Homo sapiens
  Table 4 sequence identifier: P41226_C599
  MOD_RES (17)..(17): May or may not be conjugated to a chemical probe
RAPASAAASEDAPYPVCTVRY

SEQ ID NO: 8716 - protein, 19 aa, Homo sapiens
  Table 4 sequence identifier: Q06203_C100
  MOD_RES (2)..(2): May or may not be conjugated to a chemical probe
KCELENCQPFVVETLHGKI

SEQ ID NO: 8717 - protein, 9 aa, Homo sapiens
  Table 4 sequence identifier: Q96F07_C98
  MOD_RES (2)..(2): May or may not be conjugated to a chemical probe
KCNEQPNRV

SEQ ID NO: 8718 - protein, 17 aa, Homo sapiens
  Table 4 sequence identifier: O60610_C1227
  MOD_RES (4)..(4): May or may not be conjugated to a chemical probe
KAGCAVTSLLASELTKD

SEQ ID NO: 8719 - protein, 21 aa, Homo sapiens
  Table 4 sequence identifier: Q9Y266_C188
  MOD_RES (16)..(16): May or may not be conjugated to a chemical probe
RWTQTLSELDLAVPFCVNFRL

SEQ ID NO: 8720 - protein, 9 aa, Homo sapiens
  Table 4 sequence identifier: Q7L576_C98
  MOD_RES (2)..(2): May or may not be conjugated to a chemical probe
KCNEQPNRV

SEQ ID NO: 8721 - protein, 39 aa, Homo sapiens; identical to SEQ ID NO: 5891
  Table 4 sequence identifier: Q9H5N1_C422
  MOD_RES (35)..(35): May or may not be conjugated to a chemical probe

SEQ ID NO: 8722 - protein, 39 aa, Homo sapiens; identical to SEQ ID NO: 5891
  Table 4 sequence identifier: Q9H5N1_C423
  MOD_RES (36)..(36): May or may not be conjugated to a chemical probe

SEQ ID NO: 8723 - protein, 33 aa, Homo sapiens; identical to SEQ ID NO: 3425
  Table 4 sequence identifier: Q13501_C289
  MOD_RES (9)..(9): May or may not be conjugated to a chemical probe

SEQ ID NO: 8724 - protein, 23 aa, Homo sapiens
  Table 4 sequence identifier: Q02446_C55
  MOD_RES (20)..(20): May or may not be conjugated to a chemical probe
KTSGSQDSQPSPLALLAATCSKI

SEQ ID NO: 8725 - protein, 18 aa, Homo sapiens
  Table 4 sequence identifier: O43175_C369
  MOD_RES (6)..(6): May or may not be conjugated to a chemical probe
KNAGNCLSPAVIVGLLKE

SEQ ID NO: 8726 - protein, 11 aa, Homo sapiens
  Table 4 sequence identifier: Q93008_C1237
  MOD_RES (7)..(7): May or may not be conjugated to a chemical probe
RYMPDICVIRA

SEQ ID NO: 8727 - protein, 11 aa, Homo sapiens
  Table 4 sequence identifier: O00507_C1238
  MOD_RES (7)..(7): May or may not be conjugated to a chemical probe
RYMPDICVIRA

SEQ ID NO: 8728 - protein, 32 aa, Homo sapiens
  Table 4 sequence identifier: Q8TD19_C11
  MOD_RES (3)..(3): May or may not be conjugated to a chemical probe
RHCDSINSDFGSESGGCGDSSPGPSASQGPRA

SEQ ID NO: 8729 - protein, 18 aa, Homo sapiens
  Table 4 sequence identifier: Q6ZRI6_C367
  MOD_RES (2)..(2): May or may not be conjugated to a chemical probe
RCPLDFAPQTLSFPYARD

SEQ ID NO: 8730 - protein, 22 aa, Homo sapiens
  Table 4 sequence identifier: P40763_C718
  MOD_RES (10)..(10): May or may not be conjugated to a chemical probe
KFICVTPTTCSNTIDLPMSPRT

SEQ ID NO: 8731 - protein, 19 aa, Homo sapiens
  Table 4 sequence identifier: Q15723_C470
  MOD_RES (13)..(13): May or may not be conjugated to a chemical probe
KIITIPATQLAQCQLQTKS

SEQ ID NO: 8732 - protein, 15 aa, Homo sapiens
  Table 4 sequence identifier: Q8IWZ3_C615
  MOD_RES (6)..(6): May or may not be conjugated to a chemical probe
RAGHLCTVQFLISKG

SEQ ID NO: 8733 - protein, 10 aa, Homo sapiens
  Table 4 sequence identifier: O60664_C60
  MOD_RES (4)..(4): May or may not be conjugated to a chemical probe
KTVCDAAEKG

SEQ ID NO: 8734 - protein, 16 aa, Homo sapiens
  Table 4 sequence identifier: Q09666_C5502
  MOD_RES (5)..(5): May or may not be conjugated to a chemical probe
KSSGCDVNLPGVNVKL

SEQ ID NO: 8735 - protein, 25 aa, Homo sapiens
  Table 4 sequence identifier: Q8IV63_C191
  MOD_RES (18)..(18): May or may not be conjugated to a chemical probe
RDNQGILYEAAPTSTLTCDSGPQKQ

SEQ ID NO: 8736 - protein, 43 aa, Homo sapiens
  Table 4 sequence identifier: E7EQZ4_C146
  MOD_RES (14)..(14): May or may not be conjugated to a chemical probe
REEQNLSDLLSPICEVANNIEQNAQENENESQVSTDESENSRS

SEQ ID NO: 8737 - protein, 43 aa, Homo sapiens; identical to SEQ ID NO: 8736
  Table 4 sequence identifier: Q16637_C146
  MOD_RES (14)..(14): May or may not be conjugated to a chemical probe

SEQ ID NO: 8738 - protein, 23 aa, Homo sapiens
  Table 4 sequence identifier: Q8IWV7_C1603
  MOD_RES (13)..(13): May or may not be conjugated to a chemical probe
RNSLIELPDDYSCLLNQASHFRC

SEQ ID NO: 8739 - protein, 32 aa, Homo sapiens; identical to SEQ ID NO: 3431
  Table 4 sequence identifier: O14981_C936
  MOD_RES (16)..(16): May or may not be conjugated to a chemical probe

SEQ ID NO: 8740 - protein, 18 aa, Homo sapiens
  Table 4 sequence identifier: Q07352_C34
  MOD_RES (13)..(13): May or may not be conjugated to a chemical probe
KMLNYSAPSAGGCLLDRK

SEQ ID NO: 8741 - protein, 21 aa, Homo sapiens
  Table 4 sequence identifier: P25205_C119
  MOD_RES (6)..(6): May or may not be conjugated to a chemical probe
RTLTSCFLSCVVCVEGIVTKC

SEQ ID NO: 8742 - protein, 10 aa, Homo sapiens
  Table 4 sequence identifier: P35579_C1437
  MOD_RES (5)..(5): May or may not be conjugated to a chemical probe
RQSACNLEKK

SEQ ID NO: 8743 - protein, 10 aa, Homo sapiens
  Table 4 sequence identifier: Q8NF50_C2091
  MOD_RES (2)..(2): May or may not be conjugated to a chemical probe
KCETQLSQGS

SEQ ID NO: 8744 - protein, 14 aa, Homo sapiens
  Table 4 sequence identifier: P42224_C492
  MOD_RES (11)..(11): May or may not be conjugated to a chemical probe
RNLSFFLTPPCARW

SEQ ID NO: 8745 - protein, 35 aa, Homo sapiens
  Table 4 sequence identifier: O96008_C74
  MOD_RES (19)..(19): May or may not be conjugated to a chemical probe
RTPGAATASASGAAEDGACGCLPNPGTFEECHRKC

SEQ ID NO: 8746 - protein, 35 aa, Homo sapiens; identical to SEQ ID NO: 8745
  Table 4 sequence identifier: O96008_C76
  MOD_RES (21)..(21): May or may not be conjugated to a chemical probe

SEQ ID NO: 8747 - protein, 17 aa, Homo sapiens
  Table 4 sequence identifier: P46063_C606
  MOD_RES (8)..(8): May or may not be conjugated to a chemical probe
RAESSQTCHSEQGDKKM

SEQ ID NO: 8748 - protein, 9 aa, Homo sapiens
  Table 4 sequence identifier: Q9NVE7_C537
  MOD_RES (2)..(2): May or may not be conjugated to a chemical probe
RCFPGVVRS

SEQ ID NO: 8749 - protein, 23 aa, Homo sapiens
  Table 4 sequence identifier: O15371_C195
  MOD_RES (13)..(13): May or may not be conjugated to a chemical probe
RYLEVSEPQDIECCGALEYYDKA

SEQ ID NO: 8750 - protein, 21 aa, Homo sapiens
  Table 4 sequence identifier: P45880_C47
  MOD_RES (3)..(3): May or may not be conjugated to a chemical probe
KSCSGVEFSTSGSSNTDTGKV

SEQ ID NO: 8751 - protein, 25 aa, Homo sapiens
  Table 4 sequence identifier: Q8IZ07_C540
  MOD_RES (15)..(15): May or may not be conjugated to a chemical probe
RAIQESLLTSTEGLCPSALSETSRF

SEQ ID NO: 8752 - protein, 29 aa, Homo sapiens
  Table 4 sequence identifier: P49795_C73
  MOD_RES (8)..(8): May or may not be conjugated to a chemical probe
KLQPLPSCEVCATPSPEEVQSWAQSFDKL

SEQ ID NO: 8753 - protein, 29 aa, Homo sapiens
  Table 4 sequence identifier: P49795_C76
  MOD_RES (11)..(11): May or may not be conjugated to a chemical probe
KLQPLPSCEVCATPSPEEVQSWAQSFDKL

SEQ ID NO: 8754 - protein, 21 aa, Homo sapiens
  Table 4 sequence identifier: Q69YN2_C288
  MOD_RES (11)..(11): May or may not be conjugated to a chemical probe
QILAPVEESACQFFFDLNEKQ

SEQ ID NO: 8755 - protein, 26 aa, Homo sapiens
  Table 4 sequence identifier: Q53ET0_C515
  MOD_RES (13)..(13): May or may not be conjugated to a chemical probe
KSLQQPGLPSQSCSVQSSGGQPPGRQ

SEQ ID NO: 8756 - protein, 24 aa, Homo sapiens
  Table 4 sequence identifier: P78371_C412
  MOD_RES (8)..(8): May or may not be conjugated to a chemical probe
RTVYGGGCSEMLMAHAVTQLANRT

SEQ ID NO: 8757 - protein, 24 aa, Homo sapiens
  Table 4 sequence identifier: Q99961_C277
  MOD_RES (18)..(18): May or may not be conjugated to a chemical probe
REPFDLGEPEQSNGGFPCTTAPKI

SEQ ID NO: 8758 - protein, 29 aa, Homo sapiens
  Table 4 sequence identifier: P33241_C36
  MOD_RES (24)..(24): May or may not be conjugated to a chemical probe
REELLGPTAQWSVEDEEEAVHEQCQHERD

SEQ ID NO: 8759 - protein, 17 aa, Homo sapiens
  Table 4 sequence identifier: Q8NFI3_C113
  MOD_RES (15)..(15): May or may not be conjugated to a chemical probe
RLEDGFNVALEPLACRQ

SEQ ID NO: 8760 - protein, 11 aa, Homo sapiens
  Table 4 sequence identifier: Q9BXJ9_C238
  MOD_RES (9)..(9): May or may not be conjugated to a chemical probe
KGELLLQLCRL

SEQ ID NO: 8761 - protein, 26 aa, Homo sapiens
  Table 4 sequence identifier: Q92570_C301
  MOD_RES (19)..(19): May or may not be conjugated to a chemical probe
RSSSSGEGTCAVCGDNAACQHYGVRT

SEQ ID NO: 8762 - protein, 15 aa, Homo sapiens
  Table 4 sequence identifier: I3L097_C251
  MOD_RES (4)..(4): May or may not be conjugated to a chemical probe
RGSCLESGGHSNDRN

SEQ ID NO: 8763 - protein, 14 aa, Homo sapiens
  Table 4 sequence identifier: Q9H6R4_C1034
  MOD_RES (12)..(12): May or may not be conjugated to a chemical probe
RQAVDSPAASFCRG

SEQ ID NO: 8764 - protein, 38 aa, Homo sapiens; identical to SEQ ID NO: 391
  Table 4 sequence identifier: O94992_C79
  MOD_RES (30)..(30): May or may not be conjugated to a chemical probe

SEQ ID NO: 8765 - protein, 20 aa, Homo sapiens
  Table 4 sequence identifier: Q8N0X7_C504
  MOD_RES (16)..(16): May or may not be conjugated to a chemical probe
KVSQFLVDGVCTVANCVGKE

SEQ ID NO: 8766 - protein, 38 aa, Homo sapiens; identical to SEQ ID NO: 391
  Table 4 sequence identifier: O94992_C84
  MOD_RES (35)..(35): May or may not be conjugated to a chemical probe

SEQ ID NO: 8767 - protein, 32 aa, Homo sapiens; identical to SEQ ID NO: 51
  Table 4 sequence identifier: Q96HE7_C166
  MOD_RES (10)..(10): May or may not be conjugated to a chemical probe

SEQ ID NO: 8768 - protein, 20 aa, Homo sapiens
  Table 4 sequence identifier: Q9GZU8_C187
  MOD_RES (18)..(18): May or may not be conjugated to a chemical probe
RLKPDPEPDDKNQEPSSCKS

SEQ ID NO: 8769 - protein, 14 aa, Homo sapiens
  Table 4 sequence identifier: Q9UKA4_C1232
  MOD_RES (6)..(6): May or may not be conjugated to a chemical probe
KVKNPCLNVQSQRS

SEQ ID NO: 8770 - protein, 11 aa, Homo sapiens
  Table 4 sequence identifier: P42224_C155
  MOD_RES (4)..(4): May or may not be conjugated to a chemical probe
KVMCIEHEIKS

SEQ ID NO: 8771 - protein, 9 aa, Homo sapiens
  Table 4 sequence identifier: P42166_C280
  MOD_RES (7)..(7): May or may not be conjugated to a chemical probe
RNLFISCKS

SEQ ID NO: 8772 - protein, 21 aa, Homo sapiens
  Table 4 sequence identifier: I3L1I5_C129
  MOD_RES (7)..(7): May or may not be conjugated to a chemical probe
KTWTQGCLSGGGTPAESPGKE

SEQ ID NO: 8773 - protein, 12 aa, Homo sapiens
  Table 4 sequence identifier: Q15052_C25
  MOD_RES (4)..(4): May or may not be conjugated to a chemical probe
KTICDPEEFLKS

SEQ ID NO: 8774 - protein, 28 aa, Homo sapiens
  Table 4 sequence identifier: O95267_C615
  MOD_RES (22)..(22): May or may not be conjugated to a chemical probe
RAKNPVAPTENNTSVGPVSNLCSLGAKD

SEQ ID NO: 8775 - protein, 11 aa, Homo sapiens
  Table 4 sequence identifier: Q9P258_C428
  MOD_RES (7)..(7): May or may not be conjugated to a chemical probe
KAVQDLCGWRI

SEQ ID NO: 8776 - protein, 28 aa, Homo sapiens
  Table 4 sequence identifier: Q7L1Q6_C35
  MOD_RES (10)..(10): May or may not be conjugated to a chemical probe
RFDPTQFQDCIIQGLTETGTDLEAVAKF

SEQ ID NO: 8777 - protein, 9 aa, Homo sapiens
  Table 4 sequence identifier: Q63HN8_C1510
  MOD_RES (4)..(4): May or may not be conjugated to a chemical probe
RKLCDSARN

SEQ ID NO: 8778 - protein, 17 aa, Homo sapiens
  Table 4 sequence identifier: Q9Y2X3_C439
  MOD_RES (14)..(14): May or may not be conjugated to a chemical probe
KTYDPSGDSTLPTCSKK

SEQ ID NO: 8779 - protein, 13 aa, Homo sapiens
  Table 4 sequence identifier: P53384_C25
  MOD_RES (8)..(8): May or may not be conjugated to a chemical probe
RGASCQGCPNQRL

SEQ ID NO: 8780 - protein, 17 aa, Homo sapiens
  Table 4 sequence identifier: O15054_C1205
  MOD_RES (12)..(12): May or may not be conjugated to a chemical probe
RDAFSPVLLQFCTDPRN

SEQ ID NO: 8781 - protein, 40 aa, Homo sapiens
  Table 4 sequence identifier: Q96BY6_C321
  MOD_RES (21)..(21): May or may not be conjugated to a chemical probe
RSTELTDLGLDSLDNSVTCECTPEETDSSENNLHADFAKY

SEQ ID NO: 8782 - protein, 40 aa, Homo sapiens; identical to SEQ ID NO: 8781
  Table 4 sequence identifier: Q96BY6_C319
  MOD_RES (19)..(19): May or may not be conjugated to a chemical probe

SEQ ID NO: 8783 - protein, 27 aa, Homo sapiens
  Table 4 sequence identifier: P01892_C363
  MOD_RES (25)..(25): May or may not be conjugated to a chemical probe
RKGGSYSQAASSDSAQGSDVSLTACKV

SEQ ID NO: 8784 - protein, 27 aa, Homo sapiens
  Table 4 sequence identifier: P01891_C363
  MOD_RES (25)..(25): May or may not be conjugated to a chemical probe
RKGGSYSQAASSDSAQGSDVSLTACKV

SEQ ID NO: 8785 - protein, 19 aa, Homo sapiens
  Table 4 sequence identifier: P49327_C1448
  MOD_RES (5)..(5): May or may not be conjugated to a chemical probe
KAINCATSGVVGLVNCLRR

SEQ ID NO: 8786 - protein, 11 aa, Homo sapiens
  Table 4 sequence identifier: Q8ND24_C655
  MOD_RES (9)..(9): May or may not be conjugated to a chemical probe
RSSHAPATCKL

SEQ ID NO: 8787 - protein, 17 aa, Homo sapiens
  Table 4 sequence identifier: Q9P2E3_C1822
  MOD_RES (6)..(6): May or may not be conjugated to a chemical probe
KATLPCSGLGISEEERV

SEQ ID NO: 8788 - protein, 22 aa, Homo sapiens
  Table 4 sequence identifier: Q9Y5K6_C540
  MOD_RES (4)..(4): May or may not be conjugated to a chemical probe
KDTCYSPKPSVYLSTPSSASKA

SEQ ID NO: 8789 - protein, 10 aa, Homo sapiens
  Table 4 sequence identifier: Q13459_C1279
  MOD_RES (5)..(5): May or may not be conjugated to a chemical probe
KSKPCGSPRV

SEQ ID NO: 8790 - protein, 32 aa, Homo sapiens
  Table 4 sequence identifier: O15355_C241
  MOD_RES (22)..(22): May or may not be conjugated to a chemical probe
RGTEAGQVGEPGIPTGEAGPSCSSASDKLPRV

SEQ ID NO: 8791 - protein, 18 aa, Homo sapiens
  Table 4 sequence identifier: Q8IV53_C174
  MOD_RES (9)..(9): May or may not be conjugated to a chemical probe
RGNSKPLSCFVAPDSGRL

SEQ ID NO: 8792 - protein, 14 aa, Homo sapiens
  Table 4 sequence identifier: Q6JBY9_C181
  MOD_RES (6)..(6): May or may not be conjugated to a chemical probe
RSQSDCGELGDFRA

SEQ ID NO: 8793 - protein, 27 aa, Homo sapiens
  Table 4 sequence identifier: Q8IU85_C354
  MOD_RES (10)..(10): May or may not be conjugated to a chemical probe
KDCLAPSTLCSFISSSSGVSGVGAERR

SEQ ID NO: 8794 - protein, 35 aa, Homo sapiens
  Table 4 sequence identifier: O95644_C209
  MOD_RES (30)..(30): May or may not be conjugated to a chemical probe
RSCNSEASSYESNYSYPYASPQTSPWQSPCVSPKT

SEQ ID NO: 8795 - protein, 13 aa, Homo sapiens
  Table 4 sequence identifier: Q92576_C885
  MOD_RES (8)..(8): May or may not be conjugated to a chemical probe
KESTTVTCTGEKA

SEQ ID NO: 8796 - protein, 22 aa, Homo sapiens
  Table 4 sequence identifier: Q5T440_C170
  MOD_RES (13)..(13): May or may not be conjugated to a chemical probe
RVWAVLPSSPEACGAASLQERA

SEQ ID NO: 8797 - protein, 13 aa, Homo sapiens
  Table 4 sequence identifier: P30519_C265
  MOD_RES (3)..(3): May or may not be conjugated to a chemical probe
RKCPFYAAEQDKG

SEQ ID NO: 8798 - protein, 15 aa, Homo sapiens
  Table 4 sequence identifier: Q86UP2_C1105
  MOD_RES (3)..(3): May or may not be conjugated to a chemical probe
KECMAGTSGSEEVKV

SEQ ID NO: 8799 - protein, 15 aa, Homo sapiens
  Table 4 sequence identifier: O15042_C624
  MOD_RES (3)..(3): May or may not be conjugated to a chemical probe
KLCQIFSDLNATYRT

SEQ ID NO: 8800 - protein, 9 aa, Homo sapiens
  Table 4 sequence identifier: Q9NVZ3_C133
  MOD_RES (4)..(4): May or may not be conjugated to a chemical probe
KQQCEFAKQ

SEQ ID NO: 8801 - protein, 14 aa, Homo sapiens
  Table 4 sequence identifier: P26651_C253
  MOD_RES (12)..(12): May or may not be conjugated to a chemical probe
RRDPTPVCCPSCRR

SEQ ID NO: 8802 - protein, 13 aa, Homo sapiens
  Table 4 sequence identifier: Q5TFE4_C119
  MOD_RES (11)..(11): May or may not be conjugated to a chemical probe
KHFLSDTGMACRS

SEQ ID NO: 8803 - protein, 32 aa, Homo sapiens; identical to SEQ ID NO: 2074
  Table 4 sequence identifier: Q9BRP1_C278
  MOD_RES (13)..(13): May or may not be conjugated to a chemical probe

SEQ ID NO: 8804 - protein, 19 aa, Homo sapiens
  Table 4 sequence identifier: Q9H410_C287
  MOD_RES (5)..(5): May or may not be conjugated to a chemical probe
KVFDCMELVMDELQGSVKQ

SEQ ID NO: 8805 - protein, 11 aa, Homo sapiens
  Table 4 sequence identifier: P27986_C146
  MOD_RES (5)..(5): May or may not be conjugated to a chemical probe
KGLECSTLYRT

SEQ ID NO: 8806 - protein, 24 aa, Homo sapiens
  Table 4 sequence identifier: P10144_C142
  MOD_RES (10)..(10): May or may not be conjugated to a chemical probe
KAQVKPGQTCSVAGWGQTAPLGKH

SEQ ID NO: 8807 - protein, 26 aa, Homo sapiens
  Table 4 sequence identifier: Q9UKF6_C498
  MOD_RES (11)..(11): May or may not be conjugated to a chemical probe
RNFNYHILSPCDLSNYTDLAMSTVKQ

SEQ ID NO: 8808 - protein, 8 aa, Homo sapiens
  Table 4 sequence identifier: P55265_C1224
  MOD_RES (6)..(6): May or may not be conjugated to a chemical probe
KNFYLCPV

SEQ ID NO: 8809 - protein, 12 aa, Homo sapiens
  Table 4 sequence identifier: Q9NXV6_C516
  MOD_RES (9)..(9): May or may not be conjugated to a chemical probe
KSVYLGTGCGKS

SEQ ID NO: 8810 - protein, 16 aa, Homo sapiens
  Table 4 sequence identifier: Q7Z401_C1289
  MOD_RES (12)..(12): May or may not be conjugated to a chemical probe
RLWSSPAFSPTCPFRE

SEQ ID NO: 8811 - protein, 8 aa, Homo sapiens
  Table 4 sequence identifier: Q9NVT9_C69
  MOD_RES (6)..(6): May or may not be conjugated to a chemical probe
RYLAECRA

SEQ ID NO: 8812 - protein, 12 aa, Homo sapiens
  Table 4 sequence identifier: Q9GZR7_C832
  MOD_RES (8)..(8): May or may not be conjugated to a chemical probe
KSESALSCLSKQ

SEQ ID NO: 8813 - protein, 26 aa, Homo sapiens
  Table 4 sequence identifier: Q2TAA2_C137
  MOD_RES (11)..(11): May or may not be conjugated to a chemical probe
RVILITPTPLCETAWEEQCIIQGCKL

SEQ ID NO: 8814 - protein, 26 aa, Homo sapiens
  Table 4 sequence identifier: Q2TAA2_C150
  MOD_RES (24)..(24): May or may not be conjugated to a chemical probe
RVILITPTPLCETAWEEQCIIQGCKL

SEQ ID NO: 8815 - protein, 26 aa, Homo sapiens
  Table 4 sequence identifier: Q2TAA2_C145
  MOD_RES (19)..(19): May or may not be conjugated to a chemical probe
RVILITPTPLCETAWEEQCIIQGCKL

SEQ ID NO: 8816 - protein, 12 aa, Homo sapiens
  Table 4 sequence identifier: Q13315_C384
  MOD_RES (10)..(10): May or may not be conjugated to a chemical probe
RESSDYSVPCKR

SEQ ID NO: 8817 - protein, 12 aa, Homo sapiens
  Table 4 sequence identifier: Q9BXJ9_C721
  MOD_RES (8)..(8): May or may not be conjugated to a chemical probe
RLFNTAVCESKD

SEQ ID NO: 8818 - protein, 10 aa, Homo sapiens
  Table 4 sequence identifier: Q8TD19_C623
  MOD_RES (7)..(7): May or may not be conjugated to a chemical probe
RLLTFGCNKC

SEQ ID NO: 8819 - protein, 13 aa, Homo sapiens
  Table 4 sequence identifier: P50749_C251
  MOD_RES (7)..(7): May or may not be conjugated to a chemical probe
RILQGPCEQISKV

SEQ ID NO: 8820 - protein, 12 aa, Homo sapiens
  Table 4 sequence identifier: Q92831_C690
  MOD_RES (9)..(9): May or may not be conjugated to a chemical probe
RKVYPGLSCFKE

SEQ ID NO: 8821 - protein, 12 aa, Homo sapiens
  Table 4 sequence identifier: Q92830_C695
  MOD_RES (9)..(9): May or may not be conjugated to a chemical probe
RKVYPGLSCFKE

SEQ ID NO: 8822 - protein, 13 aa, Homo sapiens
  Table 4 sequence identifier: P11216_C437
  MOD_RES (10)..(10): May or may not be conjugated to a chemical probe
RMSVIEEGDCKRI

SEQ ID NO: 8823 - protein, 18 aa, Homo sapiens
  Table 4 sequence identifier: P30044_C100
  MOD_RES (15)..(15): May or may not be conjugated to a chemical probe
KGVLFGVPGAFTPGCSKT

SEQ ID NO: 8824 - protein, 13 aa, Homo sapiens
  Table 4 sequence identifier: Q9Y3T9_C585
  MOD_RES (10)..(10): May or may not be conjugated to a chemical probe
KVQENSAYICSRR

SEQ ID NO: 8825 - protein, 18 aa, Homo sapiens
  Table 4 sequence identifier: Q9NVG8_C387
  MOD_RES (12)..(12): May or may not be conjugated to a chemical probe
RLLQDYPITDVCQILQKA

SEQ ID NO: 8826 - protein, 20 aa, Homo sapiens
  Table 4 sequence identifier: O14933_C102
  MOD_RES (3)..(3): May or may not be conjugated to a chemical probe
KTCQVLEALNVLVNRPNIRE

SEQ ID NO: 8827 - protein, 11 aa, Homo sapiens
  Table 4 sequence identifier: Q9UNE7_C199
  MOD_RES (6)..(6): May or may not be conjugated to a chemical probe
RAQQACIEAKH

SEQ ID NO: 8828 - protein, 21 aa, Homo sapiens
  Table 4 sequence identifier: Q9UKA4_C1257
  MOD_RES (4)..(4): May or may not be conjugated to a chemical probe
KTLCNFAGDLAAEVITEAEKI

SEQ ID NO: 8829 - protein, 20 aa, Homo sapiens
  Table 4 sequence identifier: Q8TCU6_C37
  MOD_RES (15)..(15): May or may not be conjugated to a chemical probe
RAPGAAAPSSGPGPCAAARE

SEQ ID NO: 8830 - protein, 21 aa, Homo sapiens
  Table 4 sequence identifier: P54274_C118
  MOD_RES (17)..(17): May or may not be conjugated to a chemical probe
RNSAEAIIHGLSSLTACQLRT

SEQ ID NO: 8831 - protein, 47 aa, Homo sapiens
  Table 4 sequence identifier: P11161_C469
  MOD_RES (43)..(43): May or may not be conjugated to a chemical probe
KSSAPSASVPAPSTASCSGGVQPGGTLCSSNSSSLGGGPLAPCSSRT

SEQ ID NO: 8832 - protein, 47 aa, Homo sapiens; identical to SEQ ID NO: 8831
  Table 4 sequence identifier: P11161_C454
  MOD_RES (28)..(28): May or may not be conjugated to a chemical probe

SEQ ID NO: 8833 - protein, 24 aa, Homo sapiens
  Table 4 sequence identifier: Q8TAQ2_C145
  MOD_RES (17)..(17): May or may not be conjugated to a chemical probe
KSLVQNNCLSRPNIFLCPEIEPKL

SEQ ID NO: 8834 - protein, 18 aa, Homo sapiens
  Table 4 sequence identifier: Q13232_C158
  MOD_RES (7)..(7): May or may not be conjugated to a chemical probe
RADELLCWEDSAGHWLYE

SEQ ID NO: 8835 - protein, 19 aa, Homo sapiens
  Table 4 sequence identifier: Q9NXV6_C178
  MOD_RES (12)..(12): May or may not be conjugated to a chemical probe
RASAQQENSSTCIGSAIKS

SEQ ID NO: 8836 - protein, 44 aa, Homo sapiens
  Table 4 sequence identifier: P01106_C25
  MOD_RES (16)..(16): May or may not be conjugated to a chemical probe
RNYDLDYDSVQPYFYCDEEENFYQQQQQSELQPPAPSEDIWKKF

SEQ ID NO: 8837 - protein, 29 aa, Homo sapiens
  Table 4 sequence identifier: Q6L8Q7_C108
  MOD_RES (12)..(12): May or may not be conjugated to a chemical probe
KSRPNASGGAACSGPGPEPAVFCEPVVKL

SEQ ID NO: 8838 - protein, 29 aa, Homo sapiens
  Table 4 sequence identifier: Q6L8Q7_C119
  MOD_RES (23)..(23): May or may not be conjugated to a chemical probe
KSRPNASGGAACSGPGPEPAVFCEPVVKL

SEQ ID NO: 8839 - protein, 23 aa, Homo sapiens
  Table 4 sequence identifier: P45880_C210
  MOD_RES (3)..(3): May or may not be conjugated to a chemical probe
KVCEDLDTSVNLAWTSGTNCTRF

SEQ ID NO: 8840 - protein, 12 aa, Homo sapiens
  Table 4 sequence identifier: B0V043_C41
  MOD_RES (3)..(3): May or may not be conjugated to a chemical probe
RICLQPPPTSRT

SEQ ID NO: 8841 - protein, 23 aa, Homo sapiens
  Table 4 sequence identifier: P45880_C227
  MOD_RES (20)..(20): May or may not be conjugated to a chemical probe
KVCEDLDTSVNLAWTSGTNCTRF

SEQ ID NO: 8842 - protein, 23 aa, Homo sapiens
  Table 4 sequence identifier: Q9BU23_C696
  MOD_RES (17)..(17): May or may not be conjugated to a chemical probe
KDSGAASEQATAAPNPCSSSSRT

SEQ ID NO: 8843 - protein, 21 aa, Homo sapiens
  Table 4 sequence identifier: Q8NDX1_C435
  MOD_RES (17)..(17): May or may not be conjugated to a chemical probe
REGGHPQESLPCTLAPCPWRS

SEQ ID NO: 8844 - protein, 16 aa, Homo sapiens
  Table 4 sequence identifier: Q9Y4B6_C784
  MOD_RES (8)..(8): May or may not be conjugated to a chemical probe
KLPLFSSCQIQQLMKE

SEQ ID NO: 8845 - protein, 17 aa, Homo sapiens
  Table 4 sequence identifier: Q8IY21_C1051
  MOD_RES (6)..(6): May or may not be conjugated to a chemical probe
RAQELCPENFIHFNNKL

SEQ ID NO: 8846 - protein, 30 aa, Homo sapiens; identical to SEQ ID NO: 748
  Table 4 sequence identifier: O94829_C217
  MOD_RES (27)..(27): May or may not be conjugated to a chemical probe

SEQ ID NO: 8847 - protein, 13 aa, Homo sapiens
  Table 4 sequence identifier: Q92835_C1088
  MOD_RES (5)..(5): May or may not be conjugated to a chemical probe
RSFTCSSSAEGRA

SEQ ID NO: 8848 - protein, 19 aa, Homo sapiens
  Table 4 sequence identifier: P01106_C70
  MOD_RES (5)..(5): May or may not be conjugated to a chemical probe
RSGLCSPSYVAVTPFSLRG

SEQ ID NO: 8849 - protein, 11 aa, Homo sapiens
  Table 4 sequence identifier: Q99829_C53
  MOD_RES (3)..(3): May or may not be conjugated to a chemical probe
RNCSSPEFSKT

SEQ ID NO: 8850 - protein, 16 aa, Homo sapiens
  Table 4 sequence identifier: Q9Y2S2_C125
  MOD_RES (10)..(10): May or may not be conjugated to a chemical probe
RVILSSSTSCLMPSKL

SEQ ID NO: 8851 - protein, 13 aa, Homo sapiens
  Table 4 sequence identifier: Q14289_C562
  MOD_RES (10)..(10): May or may not be conjugated to a chemical probe
RNILVASPECVKL

SEQ ID NO: 8852 - protein, 12 aa, Homo sapiens
  Table 4 sequence identifier: P41240_C290
  MOD_RES (8)..(8): May or may not be conjugated to a chemical probe
RSVLGGDCLLKF

SEQ ID NO: 8853 - protein, 12 aa, Homo sapiens
  Table 4 sequence identifier: Q01826_C529
  MOD_RES (7)..(7): May or may not be conjugated to a chemical probe
KSQGWLCELLRW

SEQ ID NO: 8854 - protein, 12 aa, Homo sapiens
  Table 4 sequence identifier: Q9UPW6_C518
  MOD_RES (7)..(7): May or may not be conjugated to a chemical probe
KSQGWLCELLRW

SEQ ID NO: 8855 - protein, 17 aa, Homo sapiens
  Table 4 sequence identifier: Q9GZT9_C127
  MOD_RES (15)..(15): May or may not be conjugated to a chemical probe
KAKPPADPAAAASPCRA

SEQ ID NO: 8856 - protein, 23 aa, Homo sapiens
  Table 4 sequence identifier: Q99590_C553
  MOD_RES (16)..(16): May or may not be conjugated to a chemical probe
KTDVCTVHLPNDFPTCLTSESKV

SEQ ID NO: 8857 - protein, 15 aa, Homo sapiens
  Table 4 sequence identifier: Q13077_C37
  MOD_RES (4)..(4): May or may not be conjugated to a chemical probe
RALCCAGCLSENPRN

SEQ ID NO: 8858 - protein, 15 aa, Homo sapiens
  Table 4 sequence identifier: Q13077_C38
  MOD_RES (5)..(5): May or may not be conjugated to a chemical probe
RALCCAGCLSENPRN

SEQ ID NO: 8859 - protein, 33 aa, Homo sapiens; identical to SEQ ID NO: 5902
  Table 4 sequence identifier: O95352_C524
  MOD_RES (9)..(9): May or may not be conjugated to a chemical probe

SEQ ID NO: 8860 - protein, 26 aa, Homo sapiens
  Table 4 sequence identifier: Q63HN8_C62
  MOD_RES (7)..(7): May or may not be conjugated to a chemical probe
KEEGGPCLFPGSDSWQENPEEPCSKA

SEQ ID NO: 8861 - protein, 26 aa, Homo sapiens
  Table 4 sequence identifier: Q63HN8_C78
  MOD_RES (23)..(23): May or may not be conjugated to a chemical probe
KEEGGPCLFPGSDSWQENPEEPCSKA

SEQ ID NO: 8862 - protein, 33 aa, Homo sapiens
  Table 4 sequence identifier: E9PPU0_C1888
  MOD_RES (12)..(12): May or may not be conjugated to a chemical probe
RTGGQALSTLECVKPYLEGSGCIAGVTVPSTRE

SEQ ID NO: 8863 - protein, 12 aa, Homo sapiens
  Table 4 sequence identifier: Q63HN8_C4258
  MOD_RES (5)..(5): May or may not be conjugated to a chemical probe
KEKQCYLQQVKQ

SEQ ID NO: 8864 - protein, 11 aa, Homo sapiens
  Table 4 sequence identifier: Q9UKX7_C151
  MOD_RES (3)..(3): May or may not be conjugated to a chemical probe
KACVGNAYHKQ

SEQ ID NO: 8865 - protein, 15 aa, Homo sapiens
  Table 4 sequence identifier: P45880_C76
  MOD_RES (5)..(5): May or may not be conjugated to a chemical probe
KYKWCEYGLTFTEKW

SEQ ID NO: 8866 - protein, 25 aa, Homo sapiens
  Table 4 sequence identifier: Q6NYC8_C397
  MOD_RES (7)..(7): May or may not be conjugated to a chemical probe
RALQNCCSVPSPLPPEDAGTGGLRQ

SEQ ID NO: 8867 - protein, 25 aa, Homo sapiens
  Table 4 sequence identifier: Q6NYC8_C396
  MOD_RES (6)..(6): May or may not be conjugated to a chemical probe
RALQNCCSVPSPLPPEDAGTGGLRQ

SEQ ID NO: 8868 - protein, 10 aa, Homo sapiens
  Table 4 sequence identifier: Q9ULV4_C420
  MOD_RES (2)..(2): May or may not be conjugated to a chemical probe
KCDLISIPKK

SEQ ID NO: 8869 - protein, 17 aa, Homo sapiens
  Table 4 sequence identifier: Q96I15_C22
  MOD_RES (14)..(14): May or may not be conjugated to a chemical probe
RDAPAPAASQPSGCGKH

SEQ ID NO: 8870 - protein, 13 aa, Homo sapiens
  Table 4 sequence identifier: Q8WXH0_C553
  MOD_RES (7)..(7): May or may not be conjugated to a chemical probe
KNLAGECQNINKQ

SEQ ID NO: 8871 - protein, 21 aa, Homo sapiens
  Table 4 sequence identifier: Q9Y277_C36
  MOD_RES (3)..(3): May or may not be conjugated to a chemical probe
KSCSGVEFSTSGHAYTDTGKA

SEQ ID NO: 8872 - protein, 25 aa, Homo sapiens
  Table 4 sequence identifier: P31153_C104
  MOD_RES (3)..(3): May or may not be conjugated to a chemical probe
KTCNVLVALEQQSPDIAQGVHLDRN

SEQ ID NO: 8873 - protein, 21 aa, Homo sapiens
  Table 4 sequence identifier: Q14005_C1004
  MOD_RES (5)..(5): May or may not be conjugated to a chemical probe
KSLLCLPSSISCAQTPCIPKE

SEQ ID NO: 8874 - protein, 23 aa, Homo sapiens
  Table 4 sequence identifier: Q16548_C19
  MOD_RES (9)..(9): May or may not be conjugated to a chemical probe
RLAQDYLQCVLQIPQPGSGPSKT

SEQ ID NO: 8875 - protein, 18 aa, Homo sapiens
  Table 4 sequence identifier: P18583_C92
  MOD_RES (2)..(2): May or may not be conjugated to a chemical probe
RCVSVQTDPTDEIPTKKS

SEQ ID NO: 8876 - protein, 10 aa, Homo sapiens
  Table 4 sequence identifier: P31153_C56
  MOD_RES (4)..(4): May or may not be conjugated to a chemical probe
KVACETVAKT

SEQ ID NO: 8877 - protein, 30 aa, Homo sapiens; identical to SEQ ID NO: 6117
  Table 4 sequence identifier: Q04759_C14
  MOD_RES (9)..(9): May or may not be conjugated to a chemical probe

SEQ ID NO: 8878 - protein, 19 aa, Homo sapiens
  Table 4 sequence identifier: Q7Z4W1_C244
  MOD_RES (19)..(19): May or may not be conjugated to a chemical probe
RSGMTTGSTLPVEGGFWAC

SEQ ID NO: 8879 - protein, 9 aa, Homo sapiens
  Table 4 sequence identifier: Q9Y6C9_C296
  MOD_RES (4)..(4): May or may not be conjugated to a chemical probe
KTYCCDLKM

SEQ ID NO: 8880 - protein, 28 aa, Homo sapiens
  Table 4 sequence identifier: Q86YS7_C993
  MOD_RES (21)..(21): May or may not be conjugated to a chemical probe
RESDLEVVSSQQPTTNCQSSCTEGEVTT

SEQ ID NO: 8881 - protein, 17 aa, Homo sapiens
  Table 4 sequence identifier: Q13045_C46
  MOD_RES (5)..(5): May or may not be conjugated to a chemical probe
RTGLCYLPEELAALQKL

SEQ ID NO: 8882 - protein, 13 aa, Homo sapiens
  Table 4 sequence identifier: Q9UL40_C68
  MOD_RES (4)..(4): May or may not be conjugated to a chemical probe
KNQCLFTNTQCKV

SEQ ID NO: 8883 - protein, 12 aa, Homo sapiens
  Table 4 sequence identifier: Q5T4S7_C2554
  MOD_RES (5)..(5): May or may not be conjugated to a chemical probe
KAVQCLNTSSKE

SEQ ID NO: 8884 - protein, 24 aa, Homo sapiens
  Table 4 sequence identifier: Q8N0Z8_C292
  MOD_RES (13)..(13): May or may not be conjugated to a chemical probe
KSVLYGNLGAASCTLQGPQFGSHG

SEQ ID NO: 8885 - protein, 10 aa, Homo sapiens
  Table 4 sequence identifier: P46109_C249
  MOD_RES (5)..(5): May or may not be conjugated to a chemical probe
KRVPCAYDKT

SEQ ID NO: 8886 - protein, 52 aa, Homo sapiens
  Table 4 sequence identifier: Q96CW5_C194
  MOD_RES (49)..(49): May or may not be conjugated to a chemical probe
RSAQSAQSSGSVGSSGISSIGLCALSGPAPAPQSLLPGQSNQAPGVGDCLRQ

SEQ ID NO: 8887 - protein, 22 aa, Homo sapiens
  Table 4 sequence identifier: P54136_C32
  MOD_RES (3)..(3): May or may not be conjugated to a chemical probe
KNCGCLGASPNLEQLQEENLKL

SEQ ID NO: 8888 - protein, 24 aa, Homo sapiens
  Table 4 sequence identifier: Q15005_C17
  MOD_RES (8)..(8): May or may not be conjugated to a chemical probe
RSGGSGGCSGAGGASNCGTGSGRS

SEQ ID NO: 8889 - protein, 24 aa, Homo sapiens
  Table 4 sequence identifier: Q15306_C194
  MOD_RES (16)..(16): May or may not be conjugated to a chemical probe
RDYVPDQPHPEIPYQCPMTFGPRG

SEQ ID NO: 8890 - protein, 29 aa, Homo sapiens
  Table 4 sequence identifier: Q96GW9_C425
  MOD_RES (12)..(12): May or may not be conjugated to a chemical probe
RINPSETYPAFCTTCFPSEPGLVGPSVRA

SEQ ID NO: 8891 - protein, 13 aa, Homo sapiens
  Table 4 sequence identifier: Q02556_C306
  MOD_RES (11)..(11): May or may not be conjugated to a chemical probe
RVFCSGNAVVCKG

SEQ ID NO: 8892 - protein, 14 aa, Homo sapiens
  Table 4 sequence identifier: Q9Y4W2_C456
  MOD_RES (5)..(5): May or may not be conjugated to a chemical probe
RLFNCSASLDWPRM

SEQ ID NO: 8893 - protein, 16 aa, Homo sapiens
  Table 4 sequence identifier: Q8TB24_C942
  MOD_RES (13)..(13): May or may not be conjugated to a chemical probe
RCFQLADDALPHCIKG

SEQ ID NO: 8894 - protein, 11 aa, Homo sapiens
  Table 4 sequence identifier: Q96Q11_C373
  MOD_RES (7)..(7): May or may not be conjugated to a chemical probe
KYQGEHCLLKE

SEQ ID NO: 8895 - protein, 11 aa, Homo sapiens
  Table 4 sequence identifier: O00170_C122
  MOD_RES (4)..(4): May or may not be conjugated to a chemical probe
RHCCGVAQMRE

SEQ ID NO: 8896 - protein, 20 aa, Homo sapiens
  Table 4 sequence identifier: Q7Z2W4_C645
  MOD_RES (17)..(17): May or may not be conjugated to a chemical probe
KNSNVDSSYLESLYQSCPRG

SEQ ID NO: 8897 - protein, 13 aa, Homo sapiens
  Table 4 sequence identifier: O95081_C39
  MOD_RES (6)..(6): May or may not be conjugated to a chemical probe
RELGGCSQAGNRH

SEQ ID NO: 8898 - protein, 11 aa, Homo sapiens
  Table 4 sequence identifier: P11216_C326
  MOD_RES (3)..(3): May or may not be conjugated to a chemical probe
RTCFETFPDKV

SEQ ID NO: 8899 - protein, 17 aa, Homo sapiens
  Table 4 sequence identifier: Q16548_C55
  MOD_RES (3)..(3): May or may not be conjugated to a chemical probe
KSCLDNVNVVSVDTART

SEQ ID NO: 8900 - protein, 26 aa, Homo sapiens
  Table 4 sequence identifier: Q7Z6Z7_C3372
  MOD_RES (3)..(3): May or may not be conjugated to a chemical probe
KACSPCSSQSSSSGICTDFWDLLVKL

SEQ ID NO: 8901 - protein, 12 aa, Homo sapiens
  Table 4 sequence identifier: A6NDG6_C297
  MOD_RES (8)..(8): May or may not be conjugated to a chemical probe
KNNQESDCVSKK

SEQ ID NO: 8902 - protein, 11 aa, Homo sapiens
  Table 4 sequence identifier: O95336_C32
  MOD_RES (4)..(4): May or may not be conjugated to a chemical probe
RAACCLAGARA

SEQ ID NO: 8903 - protein, 29 aa, Homo sapiens
  Table 4 sequence identifier: O14933_C98
  MOD_RES (26)..(26): May or may not be conjugated to a chemical probe
KIYHPNVDENGQICLPIISSENWKPCTKT

SEQ ID NO: 8904 - protein, 10 aa, Homo sapiens
  Table 4 sequence identifier: P49588_C773
  MOD_RES (2)..(2): May or may not be conjugated to a chemical probe
KCLSVMEAKV

SEQ ID NO: 8905 - protein, 13 aa, Homo sapiens
  Table 4 sequence identifier: Q9Y277_C65
  MOD_RES (3)..(3): May or may not be conjugated to a chemical probe
KVCNYGLTFTQKW

SEQ ID NO: 8906 - protein, 11 aa, Homo sapiens
  Table 4 sequence identifier: Q6IA69_C428
  MOD_RES (8)..(8): May or may not be conjugated to a chemical probe
KNSSQETCTRA

SEQ ID NO: 8907 - protein, 15 aa, Homo sapiens
  Table 4 sequence identifier: Q9Y2W6_C109
  MOD_RES (13)..(13): May or may not be conjugated to a chemical probe
RVLLISGFPVQVCKA

SEQ ID NO: 8908 - protein, 16 aa, Homo sapiens
  Table 4 sequence identifier: Q9NRW3_C130
  MOD_RES (9)..(9): May or may not be conjugated to a chemical probe
RLYYFQYPCYQEGLRS

SEQ ID NO: 8909 - protein, 14 aa, Homo sapiens
  Table 4 sequence identifier: P00813_C75
  MOD_RES (12)..(12): May or may not be conjugated to a chemical probe
KFDYYMPAIAGCRE

SEQ ID NO: 8910 - protein, 9 aa, Homo sapiens
  Table 4 sequence identifier: O14920_C464
  MOD_RES (5)..(5): May or may not be conjugated to a chemical probe
RNNSCLSKM

SEQ ID NO: 8911 - protein, 10 aa, Homo sapiens
  Table 4 sequence identifier: Q9NWZ3_C13
  MOD_RES (2)..(2): May or may not be conjugated to a chemical probe
RCLNVGLIRK

SEQ ID NO: 8912 - protein, 24 aa, Homo sapiens
  Table 4 sequence identifier: Q13422_C394
  MOD_RES (9)..(9): May or may not be conjugated to a chemical probe
REASPSNSCQDSTDTESNNEEQRS

SEQ ID NO: 8913 - protein, 30 aa, Homo sapiens; identical to SEQ ID NO: 6117
  Table 4 sequence identifier: Q04759_C17
  MOD_RES (12)..(12): May or may not be conjugated to a chemical probe

SEQ ID NO: 8914 - protein, 21 aa, Homo sapiens
  Table 4 sequence identifier: Q14005_C1011
  MOD_RES (12)..(12): May or may not be conjugated to a chemical probe
KSLLCLPSSISCAQTPCIPKE

SEQ ID NO: 8915 - protein, 15 aa, Homo sapiens
  Table 4 sequence identifier: O75694_C1344
  MOD_RES (12)..(12): May or may not be conjugated to a chemical probe
RYVENPSQVLNCERR

SEQ ID NO: 8916 - protein, 10 aa, Homo sapiens
  Table 4 sequence identifier: Q9BU76_C58
  MOD_RES (4)..(4): May or may not be conjugated to a chemical probe
RAPCAGPSRE

SEQ ID NO: 8917 - protein, 14 aa, Homo sapiens
  Table 4 sequence identifier: Q6FI81_C251
  MOD_RES (5)..(5): May or may not be conjugated to a chemical probe
KNCTCGLAEELEKE

SEQ ID NO: 8918 - protein, 22 aa, Homo sapiens
  Table 4 sequence identifier: P54136_C34
  MOD_RES (5)..(5): May or may not be conjugated to a chemical probe
KNCGCLGASPNLEQLQEENLKL

SEQ ID NO: 8919 - protein, 11 aa, Homo sapiens
  Table 4 sequence identifier: Q3ZCM7_C303
  MOD_RES (7)..(7): May or may not be conjugated to a chemical probe
KNMMAACDPRH

SEQ ID NO: 8920 - protein, 11 aa, Homo sapiens
  Table 4 sequence identifier: Q3ZCM7_C354
  MOD_RES (5)..(5): May or may not be conjugated to a chemical probe
KTAVCDIPPRG

SEQ ID NO: 8921 - protein, 18 aa, Homo sapiens
  Table 4 sequence identifier: Q13163_C300
  MOD_RES (3)..(3): May or may not be conjugated to a chemical probe
KLCDFGVSTQLVNSIAKT

SEQ ID NO: 8922 - protein, 20 aa, Homo sapiens
  Table 4 sequence identifier: Q8IZL8_C237
  MOD_RES (14)..(14): May or may not be conjugated to a chemical probe
RVDALSPQLQQLACECYSRL

SEQ ID NO: 8923 - protein, 18 aa, Homo sapiens
  Table 4 sequence identifier: A0AVT1_C546
  MOD_RES (3)..(3): May or may not be conjugated to a chemical probe
KVCPTTETIYNDEFYTKQ

SEQ ID NO: 8924 - protein, 13 aa, Homo sapiens
  Table 4 sequence identifier: Q7L2J0_C522
  MOD_RES (3)..(3): May or may not be conjugated to a chemical probe
RSCFPASLTASRG

SEQ ID NO: 8925 - protein, 24 aa, Homo sapiens
  Table 4 sequence identifier: Q14657_C23
  MOD_RES (22)..(22): May or may not be conjugated to a chemical probe
RDADADAGGGADGGDGRGGHSCRG

SEQ ID NO: 8926 - protein, 12 aa, Homo sapiens
  Table 4 sequence identifier: B0I1T2_C979
  MOD_RES (5)..(5): May or may not be conjugated to a chemical probe
RVSDCIPLSHRG

SEQ ID NO: 8927 - protein, 15 aa, Homo sapiens
  Table 4 sequence identifier: P36969_C134
  MOD_RES (3)..(3): May or may not be conjugated to a chemical probe
KICVNGDDAHPLWKW

SEQ ID NO: 8928 - protein, 9 aa, Homo sapiens
  Table 4 sequence identifier: Q14149_C15
  MOD_RES (6)..(6): May or may not be conjugated to a chemical probe
RLSALCPKF

SEQ ID NO: 8929 - protein, 15 aa, Homo sapiens
  Table 4 sequence identifier: P82932_C105
  MOD_RES (3)..(3): May or may not be conjugated to a chemical probe
KECEGIVPVPLAEKL

SEQ ID NO: 8930 - protein, 12 aa, Homo sapiens
  Table 4 sequence identifier: Q16666_C637
  MOD_RES (10)..(10): May or may not be conjugated to a chemical probe
KIIAIANYVCRN

SEQ ID NO: 8931 - protein, 14 aa, Homo sapiens
  Table 4 sequence identifier: Q10567_C866
  MOD_RES (3)..(3): May or may not be conjugated to a chemical probe
RDCPLNAEAASSKL

SEQ ID NO: 8932 - protein, 10 aa, Homo sapiens
  Table 4 sequence identifier: Q709C8_C2159
  MOD_RES (5)..(5): May or may not be conjugated to a chemical probe
KVLACPFLRE

SEQ ID NO: 8933 - protein, 26 aa, Homo sapiens
  Table 4 sequence identifier: Q7Z6Z7_C3375
  MOD_RES (6)..(6): May or may not be conjugated to a chemical probe
KACSPCSSQSSSSGICTDFWDLLVKL

SEQ ID NO: 8934 - protein, 26 aa, Homo sapiens
  Table 4 sequence identifier: Q7Z6Z7_C3385
  MOD_RES (16)..(16): May or may not be conjugated to a chemical probe
KACSPCSSQSSSSGICTDFWDLLVKL

SEQ ID NO: 8935 - protein, 19 aa, Homo sapiens
  Table 4 sequence identifier: Q9ULA0_C327
  MOD_RES (6)..(6): May or may not be conjugated to a chemical probe
RISASCQHPTAFEEAIPKS

SEQ ID NO: 8936 - protein, 10 aa, Homo sapiens
  Table 4 sequence identifier: P29590_C479
  MOD_RES (2)..(2): May or may not be conjugated to a chemical probe
KCSQTQCPRK

SEQ ID NO: 8937 - protein, 17 aa, Homo sapiens
  Table 4 sequence identifier: Q9NRG0_C55
  MOD_RES (9)..(9): May or may not be conjugated to a chemical probe
KATELFVQCLATYSYRH

SEQ ID NO: 8938 - protein, 21 aa, Homo sapiens
  Table 4 sequence identifier: Q14005_C1016
  MOD_RES (17)..(17): May or may not be conjugated to a chemical probe
KSLLCLPSSISCAQTPCIPKE

SEQ ID NO: 8939 - protein, 35 aa, Homo sapiens; identical to SEQ ID NO: 2218
  Table 4 sequence identifier: Q8NCF5_C232
  MOD_RES (3)..(3): May or may not be conjugated to a chemical probe

SEQ ID NO: 8940 - protein, 24 aa, Homo sapiens
  Table 4 sequence identifier: Q96QT6_C233
  MOD_RES (14)..(14): May or may not be conjugated to a chemical probe
RNPTQFQLPNELTCTTALPGSSKR

SEQ ID NO: 8941 - protein, 23 aa, Homo sapiens
  Table 4 sequence identifier: Q29RF7_C532
  MOD_RES (16)..(16): May or may not be conjugated to a chemical probe
RELLDLHKQPTSEANCSAMFGKL

SEQ ID NO: 8942 - protein, 11 aa, Homo sapiens
  Table 4 sequence identifier: Q16254_C88
  MOD_RES (7)..(7): May or may not be conjugated to a chemical probe
KGVGPGCNTRE

SEQ ID NO: 8943 - protein, 12 aa, Homo sapiens
  Table 4 sequence identifier: Q53GL7_C434
  MOD_RES (9)..(9): May or may not be conjugated to a chemical probe
KAGPVSPGCVKL

SEQ ID NO: 8944 - protein, 12 aa, Homo sapiens
  Table 4 sequence identifier: Q93009_C315
  MOD_RES (4)..(4): May or may not be conjugated to a chemical probe
KGTCVEGTIPKL

SEQ ID NO: 8945 - protein, 21 aa, Homo sapiens
  Table 4 sequence identifier: O95931_C102
  MOD_RES (3)..(3): May or may not be conjugated to a chemical probe
KLCFSLTCPLGSGSPEGVVKA

SEQ ID NO: 8946 - protein, 21 aa, Homo sapiens
  Table 4 sequence identifier: O95931_C107
  MOD_RES (8)..(8): May or may not be conjugated to a chemical probe
KLCFSLTCPLGSGSPEGVVKA

SEQ ID NO: 8947 - protein, 12 aa, Homo sapiens
  Table 4 sequence identifier: Q5VZ89_C850
  MOD_RES (9)..(9): May or may not be conjugated to a chemical probe
KILTAALTCPKT

SEQ ID NO: 8948 - protein, 25 aa, Homo sapiens
  Table 4 sequence identifier: Q8NF50_C939
  MOD_RES (6)..(6): May or may not be conjugated to a chemical probe
RMSYYCSGSSDAPSSPAAPRPASKK

SEQ ID NO: 8949 - protein, 22 aa, Homo sapiens
  Table 4 sequence identifier: Q7Z3B4_C171
  MOD_RES (20)..(20): May or may not be conjugated to a chemical probe
KGYFNNNIPPVEFTQENPFCRF

SEQ ID NO: 8950 - protein, 14 aa, Homo sapiens
  Table 4 sequence identifier: Q6FI81_C249
  MOD_RES (3)..(3): May or may not be conjugated to a chemical probe
KNCTCGLAEELEKE

SEQ ID NO: 8951 - protein, 11 aa, Homo sapiens
  Table 4 sequence identifier: Q92888_C595
  MOD_RES (9)..(9): May or may not be conjugated to a chemical probe
KVELAAECCRE

SEQ ID NO: 8952 - protein, 8 aa, Homo sapiens
  Table 4 sequence identifier: Q8TDG2_C182
  MOD_RES (3)..(3): May or may not be conjugated to a chemical probe
KLCMAGRD

SEQ ID NO: 8953 - protein, 14 aa, Homo sapiens
  Table 4 sequence identifier: O60216_C78
  MOD_RES (7)..(7): May or may not be conjugated to a chemical probe
KYLLADCNEAFIKI

SEQ ID NO: 8954 - protein, 8 aa, Homo sapiens
  Table 4 sequence identifier: Q9UPN6_C102
  MOD_RES (2)..(2): May or may not be conjugated to a chemical probe
RCPGDDKS

SEQ ID NO: 8955 - protein, 14 aa, Homo sapiens
  Table 4 sequence identifier: Q9NVC6_C649
  MOD_RES (12)..(12): May or may not be conjugated to a chemical probe
KMELLMSALSPCLL

SEQ ID NO: 8956 - protein, 9 aa, Homo sapiens
  Table 4 sequence identifier: P35579_C816
  MOD_RES (3)..(3): May or may not be conjugated to a chemical probe
RNCAAYLKL

SEQ ID NO: 8957 - protein, 24 aa, Homo sapiens
  Table 4 sequence identifier: Q9P0J1_C149
  MOD_RES (14)..(14): May or may not be conjugated to a chemical probe
RGMLLGVFDGHAGCACSQAVSERL

SEQ ID NO: 8958 - protein, 19 aa, Homo sapiens
  Table 4 sequence identifier: O95602_C613
  MOD_RES (9)..(9): May or may not be conjugated to a chemical probe
RAEAYVLACTDQQYLVPKD

SEQ ID NO: 8959 - protein, 12 aa, Homo sapiens
  Table 4 sequence identifier: Q8IZL8_C536
  MOD_RES (6)..(6): May or may not be conjugated to a chemical probe
RTILMCGPLIKE

SEQ ID NO: 8960 - protein, 14 aa, Homo sapiens
  Table 4 sequence identifier: P42331_C154
  MOD_RES (7)..(7): May or may not be conjugated to a chemical probe
RVAGTPCGVFGQRL

SEQ ID NO: 8961 - protein, 14 aa, Homo sapiens
  Table 4 sequence identifier: P78527_C3837
  MOD_RES (5)..(5): May or may not be conjugated to a chemical probe
RAPPCEYKDWLTKM

SEQ ID NO: 8962 - protein, 14 aa, Homo sapiens
  Table 4 sequence identifier: P61978_C185
  MOD_RES (7)..(7): May or may not be conjugated to a chemical probe
KLFQECCPHSTDRV

SEQ ID NO: 8963 - protein, 11 aa, Homo sapiens
  Table 4 sequence identifier: P51610_C352
  MOD_RES (8)..(8): May or may not be conjugated to a chemical probe
KAWNNQVCCKD

SEQ ID NO: 8964 - protein, 11 aa, Homo sapiens
  Table 4 sequence identifier: J3QR44_C422
  MOD_RES (9)..(9): May or may not be conjugated to a chemical probe
KYLPALQGCRS

SEQ ID NO: 8965 - protein, 11 aa, Homo sapiens
  Table 4 sequence identifier: P21127_C432
  MOD_RES (9)..(9): May or may not be conjugated to a chemical probe
KYLPALQGCRS

SEQ ID NO: 8966 - protein, 12 aa, Homo sapiens
  Table 4 sequence identifier: Q01082_C183
  MOD_RES (8)..(8): May or may not be conjugated to a chemical probe
KDALLLWCQMKT

SEQ ID NO: 8967 - protein, 23 aa, Homo sapiens
  Table 4 sequence identifier: P05771_C502
  MOD_RES (4)..(4): May or may not be conjugated to a chemical probe
KTFCGTPDYIAPEIIAYQPYGKS

SEQ ID NO: 8968 - protein, 27 aa, Homo sapiens
  Table 4 sequence identifier: Q9NYQ6_C1840
  MOD_RES (3)..(3): May or may not be conjugated to a chemical probe
RGCMQGVRMGGTPTNVATLNMNNALKV

SEQ ID NO: 8969 - protein, 14 aa, Homo sapiens
  Table 4 sequence identifier: Q8NBU5_C137
  MOD_RES (11)..(11): May or may not be conjugated to a chemical probe
KGVLLYGPPGCGKT

SEQ ID NO: 8970 - protein, 27 aa, Homo sapiens
  Table 4 sequence identifier: Q9BXL7_C539
  MOD_RES (15)..(15): May or may not be conjugated to a chemical probe
KGHEEEGTDASPSSCGSLPITNSFTKM

SEQ ID NO: 8971 - protein, 18 aa, Homo sapiens
  Table 4 sequence identifier: Q6PCE3_C303
  MOD_RES (2)..(2): May or may not be conjugated to a chemical probe
KCPNPEEGESVLELSLRL

SEQ ID NO: 8972 - protein, 21 aa, Homo sapiens
  Table 4 sequence identifier: Q9BTE3_C287
  MOD_RES (12)..(12): May or may not be conjugated to a chemical probe
RDASALLDPMECTDTAEEQRV

SEQ ID NO: 8973 - protein, 20 aa, Homo sapiens
  Table 4 sequence identifier: Q9NTM9_C248
  MOD_RES (13)..(13): May or may not be conjugated to a chemical probe
RNSSVAMGASLSCSEYSLKV

SEQ ID NO: 8974 - protein, 23 aa, Homo sapiens
  Table 4 sequence identifier: Q9Y4P1_C74
  MOD_RES (19)..(19): May or may not be conjugated to a chemical probe
KNFPAIGGTGPTSDTGWGCMLRC

SEQ ID NO: 8975 - protein, 12 aa, Homo sapiens
  Table 4 sequence identifier: P21580_C657
  MOD_RES (8)..(8): May or may not be conjugated to a chemical probe
RFQNTIPCLGRE

SEQ ID NO: 8976 - protein, 19 aa, Homo sapiens
  Table 4 sequence identifier: O43149_C2546
  MOD_RES (12)..(12): May or may not be conjugated to a chemical probe
KAVDTDMIILPCLSRPARC

SEQ ID NO: 8977 - protein, 23 aa, Homo sapiens
  Table 4 sequence identifier: Q8NHV1_C195
  MOD_RES (5)..(5): May or may not be conjugated to a chemical probe
KMVQCNEGAYFSDDIYKDTEERL

SEQ ID NO: 8978 - protein, 24 aa, Homo sapiens
  Table 4 sequence identifier: Q14644_C206
  MOD_RES (19)..(19): May or may not be conjugated to a chemical probe
KTNNPQFDEVFYFEVTRPCSYSKK

SEQ ID NO: 8979 - protein, 11 aa, Homo sapiens
  Table 4 sequence identifier: Q99567_C608
  MOD_RES (9)..(9): May or may not be conjugated to a chemical probe
KQLEDLSYCRE

SEQ ID NO: 8980 - protein, 20 aa, Homo sapiens
  Table 4 sequence identifier: P08311_C142
  MOD_RES (12)..(12): May or may not be conjugated to a chemical probe
RAQEGLRPGTLCTVAGWGRV

SEQ ID NO: 8981 - protein, 22 aa, Homo sapiens
  Table 4 sequence identifier: O60256_C31
  MOD_RES (15)..(15): May or may not be conjugated to a chemical probe
KGGLVLFSANSNSSCMELSKKI

SEQ ID NO: 8982 - protein, 24 aa, Homo sapiens
  Table 4 sequence identifier: O95785_C1429
  MOD_RES (9)..(9): May or may not be conjugated to a chemical probe
RQFGVTEWCVNGSPIETLSEWIKH

SEQ ID NO: 8983 - protein, 34 aa, Homo sapiens; identical to SEQ ID NO: 1798
  Table 4 sequence identifier: O00148_C74
  MOD_RES (18)..(18): May or may not be conjugated to a chemical probe

SEQ ID NO: 8984 - protein, 34 aa, Homo sapiens; identical to SEQ ID NO: 1798
  Table 4 sequence identifier: O00148_C86
  MOD_RES (30)..(30): May or may not be conjugated to a chemical probe

SEQ ID NO: 8985 - protein, 23 aa, Homo sapiens
  Table 4 sequence identifier: Q9H4E7_C266
  MOD_RES (10)..(10): May or may not be conjugated to a chemical probe
RGIIPLDAHCCVEVLPDRDGKRC

SEQ ID NO: 8986 - protein, 34 aa, Homo sapiens; identical to SEQ ID NO: 244
  Table 4 sequence identifier: P31949_C91
  MOD_RES (27)..(27): May or may not be conjugated to a chemical probe

SEQ ID NO: 8987 - protein, 9 aa, Homo sapiens
  Table 4 sequence identifier: P18206_C85
  MOD_RES (6)..(6): May or may not be conjugated to a chemical probe
KVENACTKL

SEQ ID NO: 8988 - protein, 21 aa, Homo sapiens
  Table 4 sequence identifier: P12931_C280
  MOD_RES (6)..(6): May or may not be conjugated to a chemical probe
KLGQGCFGEVWMGTWNGTTRV

SEQ ID NO: 8989 - protein, 11 aa, Homo sapiens
  Table 4 sequence identifier: Q9UK61_C830
  MOD_RES (8)..(8): May or may not be conjugated to a chemical probe
KDYEQPTCAKV

SEQ ID NO: 8990 - protein, 17 aa, Homo sapiens
  Table 4 sequence identifier: P19838_C925
  MOD_RES (7)..(7): May or may not be conjugated to a chemical probe
RDSDSVCDSGVETSFRK

SEQ ID NO: 8991 - protein, 14 aa, Homo sapiens
  Table 4 sequence identifier: Q15418_C432
  MOD_RES (12)..(12): May or may not be conjugated to a chemical probe
KETIGVGSYSECKR

SEQ ID NO: 8992 - protein, 13 aa, Homo sapiens
  Table 4 sequence identifier: P17987_C397
  MOD_RES (8)..(8): May or may not be conjugated to a chemical probe
RSLHDALCVVKRV

SEQ ID NO: 8993 - protein, 8 aa, Homo sapiens
  Table 4 sequence identifier: P30566_C483
  MOD_RES (7)..(7): May or may not be conjugated to a chemical probe
KVKAELCL

SEQ ID NO: 8994 - protein, 10 aa, Homo sapiens
  Table 4 sequence identifier: Q96FV9_C49
  MOD_RES (2)..(2): May or may not be conjugated to a chemical probe
KCTLDQAFRG

SEQ ID NO: 8995 - protein, 9 aa, Homo sapiens
  Table 4 sequence identifier: Q9H9Y6_C1061
  MOD_RES (5)..(5): May or may not be conjugated to a chemical probe
RLFNCSDRS

SEQ ID NO: 8996 - protein, 15 aa, Homo sapiens
  Table 4 sequence identifier: Q9UN37_C403
  MOD_RES (8)..(8): May or may not be conjugated to a chemical probe
KLLEPVVCMSDMLRS

SEQ ID NO: 8997 - protein, 16 aa, Homo sapiens
  Table 4 sequence identifier: Q49A26_C303
  MOD_RES (6)..(6): May or may not be conjugated to a chemical probe
RTAEKCDLFIQEGARL

SEQ ID NO: 8998 - protein, 11 aa, Homo sapiens
  Table 4 sequence identifier: P49591_C300
  MOD_RES (8)..(8): May or may not be conjugated to a chemical probe
KYAGLSTCFRQ

SEQ ID NO: 8999 - protein, 11 aa, Homo sapiens
  Table 4 sequence identifier: P78371_C289
  MOD_RES (6)..(6): May or may not be conjugated to a chemical probe
KHGINCFINRQ

SEQ ID NO: 9000 - protein, 10 aa, Homo sapiens
  Table 4 sequence identifier: P55786_C265
  MOD_RES (7)..(7): May or may not be conjugated to a chemical probe
RSKDGVCVRV

SEQ ID NO: 9001 - protein, 14 aa, Homo sapiens
  Table 4 sequence identifier: Q9Y314_C185
  MOD_RES (5)..(5): May or may not be conjugated to a chemical probe
RTVTCPMSGKPLRM

SEQ ID NO: 9002 - protein, 14 aa, Homo sapiens
  Table 4 sequence identifier: P30466_C188
  MOD_RES (8)..(8): May or may not be conjugated to a chemical probe
RAYLEGTCVEWLRR

SEQ ID NO: 9003 - protein, 14 aa, Homo sapiens
  Table 4 sequence identifier: P30462_C188
  MOD_RES (8)..(8): May or may not be conjugated to a chemical probe
RAYLEGTCVEWLRR

SEQ ID NO: 9004 - protein, 16 aa, Homo sapiens
  Table 4 sequence identifier: Q14980_C80
  MOD_RES (9)..(9): May or may not be conjugated to a chemical probe
RKHPSSPECLVSAQKV

SEQ ID NO: 9005 - protein, 19 aa, Homo sapiens
  Table 4 sequence identifier: P36954_C52
  MOD_RES (13)..(13): May or may not be conjugated to a chemical probe
RNCDYQQEADNSCIYVNKI

SEQ ID NO: 9006 - protein, 13 aa, Homo sapiens
  Table 4 sequence identifier: O95639_C41
  MOD_RES (7)..(7): May or may not be conjugated to a chemical probe
KSGAAVCEFFLKA

SEQ ID NO: 9007 - protein, 15 aa, Homo sapiens
  Table 4 sequence identifier: P14618_C49
  MOD_RES (7)..(7): May or may not be conjugated to a chemical probe
RNTGIICTIGPASRS

SEQ ID NO: 9008 - protein, 18 aa, Homo sapiens
  Table 4 sequence identifier: Q7L4I2_C382
  MOD_RES (8)..(8): May or may not be conjugated to a chemical probe
KSEDEAGCSSVDEESYKT

SEQ ID NO: 9009 - protein, 18 aa, Homo sapiens
  Table 4 sequence identifier: A6NHR9_C1899
  MOD_RES (3)..(3): May or may not be conjugated to a chemical probe
KQCLILGEQIDLLQQYRS

SEQ ID NO: 9010 - protein, 28 aa, Homo sapiens
  Table 4 sequence identifier: Q86U90_C99
  MOD_RES (22)..(22): May or may not be conjugated to a chemical probe
RAGAVVAVPTDTLYGLACAASCSAALRA

SEQ ID NO: 9011 - protein, 28 aa, Homo sapiens
  Table 4 sequence identifier: Q86U90_C95
  MOD_RES (18)..(18): May or may not be conjugated to a chemical probe
RAGAVVAVPTDTLYGLACAASCSAALRA

SEQ ID NO: 9012 - protein, 18 aa, Homo sapiens
  Table 4 sequence identifier: Q14839_C1827
  MOD_RES (7)..(7): May or may not be conjugated to a chemical probe
RFAEVECLAESHQHLSKE

SEQ ID NO: 9013 - protein, 18 aa, Homo sapiens
  Table 4 sequence identifier: Q92499_C111
  MOD_RES (14)..(14): May or may not be conjugated to a chemical probe
RGSAFAIGSDGLCCQSRE

SEQ ID NO: 9014 - protein, 27 aa, Homo sapiens
  Table 4 sequence identifier: P49411_C222
  MOD_RES (14)..(14): May or may not be conjugated to a chemical probe
KGEETPVIVGSALCALEGRDPELGLKS

SEQ ID NO: 9015 - protein, 14 aa, Homo sapiens
  Table 4 sequence identifier: P49411_C290
  MOD_RES (6)..(6): May or may not be conjugated to a chemical probe
KKGDECELLGHSKN

SEQ ID NO: 9016 - protein, 13 aa, Homo sapiens
  Table 4 sequence identifier: Q9Y5U2_C99
  MOD_RES (6)..(6): May or may not be conjugated to a chemical probe
RDIFDCLEGAARR

SEQ ID NO: 9017 - protein, 18 aa, Homo sapiens
  Table 4 sequence identifier: P49189_C267
  MOD_RES (10)..(10): May or may not be conjugated to a chemical probe
KSPLIIFSDCDMNNAVKG

SEQ ID NO: 9018 - protein, 16 aa, Homo sapiens
  Table 4 sequence identifier: O75376_C1274
  MOD_RES (14)..(14): May or may not be conjugated to a chemical probe
RESPVSAPLEGLICRA

SEQ ID NO: 9019 - protein, 12 aa, Homo sapiens
  Table 4 sequence identifier: P23743_C645
  MOD_RES (3)..(3): May or may not be conjugated to a chemical probe
KTCVPDLSDKRL

SEQ ID NO: 9020 - protein, 20 aa, Homo sapiens
  Table 4 sequence identifier: P26368_C429
  MOD_RES (17)..(17): May or may not be conjugated to a chemical probe
KSIEIPRPVDGVEVPGCGKI

SEQ ID NO: 9021 - protein, 19 aa, Homo sapiens
  Table 4 sequence identifier: Q01432_C47
  MOD_RES (13)..(13): May or may not be conjugated to a chemical probe
KDALSLFTVPEDCPIGQKE

SEQ ID NO: 9022 - protein, 22 aa, Homo sapiens
  Table 4 sequence identifier: Q9HBH5_C97
  MOD_RES (6)..(6): May or may not be conjugated to a chemical probe
RQAAECGPEPGVSGVGELIVRE

SEQ ID NO: 9023 - protein, 13 aa, Homo sapiens
  Table 4 sequence identifier: Q13576_C276
  MOD_RES (6)..(6): May or may not be conjugated to a chemical probe
RLKNSCISEEERD

SEQ ID NO: 9024 - protein, 10 aa, Homo sapiens
  Table 4 sequence identifier: Q9H5V9_C11
  MOD_RES (5)..(5): May or may not be conjugated to a chemical probe
RSVVCSDTRD

SEQ ID NO: 9025 - protein, 9 aa, Homo sapiens
  Table 4 sequence identifier: Q9NYK5_C335
  MOD_RES (6)..(6): May or may not be conjugated to a chemical probe
KATEECTST

SEQ ID NO: 9026 - protein, 14 aa, Homo sapiens
  Table 4 sequence identifier: Q96JM7_C233
  MOD_RES (4)..(4): May or may not be conjugated to a chemical probe
KAWCWASYLEEEKA

SEQ ID NO: 9027 - protein, 40 aa, Homo sapiens
  Table 4 sequence identifier: P20591_C42
  MOD_RES (33)..(33): May or may not be conjugated to a chemical probe
KADPAAASHPLLLNGDATVAQKNPGSVAENNLCSQYEEKV

SEQ ID NO: 9028 - protein, 9 aa, Homo sapiens
  Table 4 sequence identifier: Q9NVS2_C186
  MOD_RES (5)..(5): May or may not be conjugated to a chemical probe
RDNVCYSRT

SEQ ID NO: 9029 - protein, 21 aa, Homo sapiens
  Table 4 sequence identifier: O15042_C65
  MOD_RES (5)..(5): May or may not be conjugated to a chemical probe
RESLCDSPHQNLSRPLLENKL

SEQ ID NO: 9030 - protein, 15 aa, Homo sapiens
  Table 4 sequence identifier: Q5H9U9_C1031
  MOD_RES (6)..(6): May or may not be conjugated to a chemical probe
RAQELCPEEFILFKN

SEQ ID NO: 9031 - protein, 18 aa, Homo sapiens
  Table 4 sequence identifier: Q9Y4A5_C3535
  MOD_RES (12)..(12): May or may not be conjugated to a chemical probe
KIYPYLVMNDACLTESRR

SEQ ID NO: 9032 - protein, 21 aa, Homo sapiens
  Table 4 sequence identifier: O60313_C801
  MOD_RES (2)..(2): May or may not be conjugated to a chemical probe
KCNEEHPAYLASDEITTVRKN

SEQ ID NO: 9033 - protein, 10 aa, Homo sapiens
  Table 4 sequence identifier: O60759_C246
  MOD_RES (8)..(8): May or may not be conjugated to a chemical probe
RLSSESSCKS

SEQ ID NO: 9034 - protein, 11 aa, Homo sapiens
  Table 4 sequence identifier: P51531_C1296
  MOD_RES (4)..(4): May or may not be conjugated to a chemical probe
RLTCEEEEEKI

SEQ ID NO: 9035 - protein, 11 aa, Homo sapiens
  Table 4 sequence identifier: P51532_C1359
  MOD_RES (4)..(4): May or may not be conjugated to a chemical probe
RLTCEEEEEKI

SEQ ID NO: 9036 - protein, 11 aa, Homo sapiens
  Table 4 sequence identifier: Q6QNY0_C168
  MOD_RES (5)..(5): May or may not be conjugated to a chemical probe
RGDLCALAERL

SEQ ID NO: 9037 - protein, 17 aa, Homo sapiens
  Table 4 sequence identifier: P16615_C447
  MOD_RES (12)..(12): May or may not be conjugated to a chemical probe
KVGEATETALTCLVEKM

SEQ ID NO: 9038 - protein, 16 aa, Homo sapiens
  Table 4 sequence identifier: Q6PJI9_C654
  MOD_RES (9)..(9): May or may not be conjugated to a chemical probe
KVIIQDIACLLPVHKS

SEQ ID NO: 9039 - protein, 15 aa, Homo sapiens
  Table 4 sequence identifier: Q99683_C928
  MOD_RES (3)..(3): May or may not be conjugated to a chemical probe
RACANDLLVDEFLKV

SEQ ID NO: 9040 - protein, 19 aa, Homo sapiens
  Table 4 sequence identifier: Q99714_C58
  MOD_RES (7)..(7): May or may not be conjugated to a chemical probe
KKLGNNCVFAPADVTSEKD

SEQ ID NO: 9041 - protein, 14 aa, Homo sapiens
  Table 4 sequence identifier: A6NC98_C1222
  MOD_RES (12)..(12): May or may not be conjugated to a chemical probe
RESNQQLDLSACRL

SEQ ID NO: 9042 - protein, 9 aa, Homo sapiens
  Table 4 sequence identifier: P78527_C4045
  MOD_RES (5)..(5): May or may not be conjugated to a chemical probe
RQKICYAKR

SEQ ID NO: 9043 - protein, 18 aa, Homo sapiens
  Table 4 sequence identifier: Q9C0B1_C171
  MOD_RES (10)..(10): May or may not be conjugated to a chemical probe
KANEDAVPLCMSADFPRV

SEQ ID NO: 9044 - protein, 16 aa, Homo sapiens
  Table 4 sequence identifier: Q9Y490_C2161
  MOD_RES (8)..(8): May or may not be conjugated to a chemical probe
RQELAVFCSPEPPAKT

SEQ ID NO: 9045 - protein, 47 aa, Homo sapiens; identical to SEQ ID NO: 1792
  Table 4 sequence identifier: P78527_C3403
  MOD_RES (24)..(24): May or may not be conjugated to a chemical probe

SEQ ID NO: 9046 - protein, 23 aa, Homo sapiens
  Table 4 sequence identifier: Q9H668_C8
  MOD_RES (2)..(2): May or may not be conjugated to a chemical probe
RCEEETPSLLWGLDPVFLAFAKL

SEQ ID NO: 9047 - protein, 25 aa, Homo sapiens
  Table 4 sequence identifier: Q96FS4_C811
  MOD_RES (7)..(7): May or may not be conjugated to a chemical probe
KQLLHLCLQDGGSPPGPGDLAEERT

SEQ ID NO: 9048 - protein, 15 aa, Homo sapiens
  Table 4 sequence identifier: Q8NI27_C1064
  MOD_RES (3)..(3): May or may not be conjugated to a chemical probe
KECGNYPGFLTILRA

SEQ ID NO: 9049 - protein, 18 aa, Homo sapiens
  Table 4 sequence identifier: O15213_C515
  MOD_RES (13)..(13): May or may not be conjugated to a chemical probe
KALLEKVPAELICLDPRA

SEQ ID NO: 9050 - protein, 10 aa, Homo sapiens
  Table 4 sequence identifier: P48147_C255
  MOD_RES (4)..(4): May or may not be conjugated to a chemical probe
REGCDPVNRL

SEQ ID NO: 9051 - protein, 12 aa, Homo sapiens
  Table 4 sequence identifier: B5ME19_C753
  MOD_RES (3)..(3): May or may not be conjugated to a chemical probe
KTCHSFIINEKM

SEQ ID NO: 9052 - protein, 15 aa, Homo sapiens
  Table 4 sequence identifier: Q15118_C71
  MOD_RES (12)..(12): May or may not be conjugated to a chemical probe
KQFLDFGSVNACEKT

SEQ ID NO: 9053 - protein, 9 aa, Homo sapiens
  Table 4 sequence identifier: P12081_C509
  MOD_RES (9)..(9): May or may not be conjugated to a chemical probe
RTGQPLCIC

SEQ ID NO: 9054 - protein, 12 aa, Homo sapiens
  Table 4 sequence identifier: O60684_C253
  MOD_RES (5)..(5): May or may not be conjugated to a chemical probe
KVSPCLPVLSRL

SEQ ID NO: 9055 - protein, 36 aa, Homo sapiens
  Table 4 sequence identifier: Q9BVP2_C234
  MOD_RES (16)..(16): May or may not be conjugated to a chemical probe
RVKAKKNAAPFRSEVCFGKEGLWKLLGGFQETCSKA

SEQ ID NO: 9056 - protein, 13 aa, Homo sapiens
  Table 4 sequence identifier: P09326_C148
  MOD_RES (9)..(9): May or may not be conjugated to a chemical probe
KIEDMDDNCYLKL

SEQ ID NO: 9057 - protein, 10 aa, Homo sapiens
  Table 4 sequence identifier: O75663_C14
  MOD_RES (4)..(4): May or may not be conjugated to a chemical probe
RDFCFGPWKL

SEQ ID NO: 9058 - protein, 11 aa, Homo sapiens
  Table 4 sequence identifier: Q9Y4W2_C306
  MOD_RES (4)..(4): May or may not be conjugated to a chemical probe
RVECVLAELKG

SEQ ID NO: 9059 - protein, 22 aa, Homo sapiens
  Table 4 sequence identifier: Q92889_C560
  MOD_RES (13)..(13): May or may not be conjugated to a chemical probe
KEPLTIIHPLLGCSDPYALTRV

SEQ ID NO: 9060 - protein, 21 aa, Homo sapiens
  Table 4 sequence identifier: Q9Y4F9_C519
  MOD_RES (19)..(19): May or may not be conjugated to a chemical probe
KEEDPEEPRKPASAPSEACRR

SEQ ID NO: 9061 - protein, 22 aa, Homo sapiens
  Table 4 sequence identifier: Q8N8A6_C402
  MOD_RES (16)..(16): May or may not be conjugated to a chemical probe
RVVAAAFQSEDPADPCALLQRR

SEQ ID NO: 9062 - protein, 19 aa, Homo sapiens
  Table 4 sequence identifier: Q92900_C188
  MOD_RES (17)..(17): May or may not be conjugated to a chemical probe
KDGPLGETVLECYNCGCRN

SEQ ID NO: 9063 - protein, 17 aa, Homo sapiens
  Table 4 sequence identifier: Q27J81_C971
  MOD_RES (6)..(6): May or may not be conjugated to a chemical probe
KQEEVCVIDALLADIRK

SEQ ID NO: 9064 - protein, 9 aa, Homo sapiens
  Table 4 sequence identifier: O00422_C26
  MOD_RES (3)..(3): May or may not be conjugated to a chemical probe
KTCPLLLRV

SEQ ID NO: 9065 - protein, 13 aa, Homo sapiens
  Table 4 sequence identifier: Q9BRU9_C207
  MOD_RES (10)..(10): May or may not be conjugated to a chemical probe
KISGPNPLSCLKK

SEQ ID NO: 9066 - protein, 11 aa, Homo sapiens
  Table 4 sequence identifier: Q9NV88_C578
  MOD_RES (9)..(9): May or may not be conjugated to a chemical probe
RVSDDVPDCKV

SEQ ID NO: 9067 - protein, 15 aa, Homo sapiens
  Table 4 sequence identifier: P57740_C78
  MOD_RES (7)..(7): May or may not be conjugated to a chemical probe
RQPDISCILGTGGKS

SEQ ID NO: 9068 - protein, 24 aa, Homo sapiens
  Table 4 sequence identifier: Q15005_C26
  MOD_RES (17)..(17): May or may not be conjugated to a chemical probe
RSGGSGGCSGAGGASNCGTGSGRS

SEQ ID NO: 9069 - protein, 19 aa, Homo sapiens
  Table 4 sequence identifier: O75643_C238
  MOD_RES (2)..(2): May or may not be conjugated to a chemical probe
RCTLSANLVASGELMSSKK

SEQ ID NO: 9070 - protein, 12 aa, Homo sapiens
  Table 4 sequence identifier: Q92608_C41
  MOD_RES (6)..(6): May or may not be conjugated to a chemical probe
RIQETCGDWYRG

SEQ ID NO: 9071 - protein, 10 aa, Homo sapiens
  Table 4 sequence identifier: P62913_C72
  MOD_RES (6)..(6): May or may not be conjugated to a chemical probe
KIAVHCTVRG

SEQ ID NO: 9072 - protein, 17 aa, Homo sapiens
  Table 4 sequence identifier: Q96FS4_C755
  MOD_RES (3)..(3): May or may not be conjugated to a chemical probe
KVCVTVLPPDESGRPRR

SEQ ID NO: 9073 - protein, 11 aa, Homo sapiens
  Table 4 sequence identifier: Q92974_C306
  MOD_RES (5)..(5): May or may not be conjugated to a chemical probe
RQALCPGSTRN

SEQ ID NO: 9074 - protein, 12 aa, Homo sapiens
  Table 4 sequence identifier: Q8TDB6_C175
  MOD_RES (3)..(3): May or may not be conjugated to a chemical probe
KVCGDFQDIERI

SEQ ID NO: 9075 - protein, 27 aa, Homo sapiens
  Table 4 sequence identifier: Q68EM7_C305
  MOD_RES (6)..(6): May or may not be conjugated to a chemical probe
KAALDCSTSHLDEFYSDPHAVAGALKS

SEQ ID NO: 9076 - protein, 13 aa, Homo sapiens
  Table 4 sequence identifier: O75131_C54
  MOD_RES (5)..(5): May or may not be conjugated to a chemical probe
RIKNCLNPQFSKT

SEQ ID NO: 9077 - protein, 14 aa, Homo sapiens
  Table 4 sequence identifier: Q9P107_C895
  MOD_RES (3)..(3): May or may not be conjugated to a chemical probe
KLCEETPITSVPRG

SEQ ID NO: 9078 - protein, 19 aa, Homo sapiens
  Table 4 sequence identifier: Q8IYQ7_C324
  MOD_RES (16)..(16): May or may not be conjugated to a chemical probe
RLGEMIETAYGENFACSKI

SEQ ID NO: 9079 - protein, 11 aa, Homo sapiens
  Table 4 sequence identifier: Q05086_C83
  MOD_RES (3)..(3): May or may not be conjugated to a chemical probe
KLCDPHPSKKG

SEQ ID NO: 9080 - protein, 20 aa, Homo sapiens
  Table 4 sequence identifier: Q8IWZ3_C181
  MOD_RES (8)..(8): May or may not be conjugated to a chemical probe
RLTSSVSCALDEAAAALTRM

SEQ ID NO: 9081 - protein, 17 aa, Homo sapiens
  Table 4 sequence identifier: Q14671_C1179
  MOD_RES (10)..(10): May or may not be conjugated to a chemical probe
KNGVDLGPICGPPNGII

SEQ ID NO: 9082 - protein, 22 aa, Homo sapiens
  Table 4 sequence identifier: Q9BVL2_C252
  MOD_RES (13)..(13): May or may not be conjugated to a chemical probe
KALKDENLPPVICQDVENLQKF

SEQ ID NO: 9083 - protein, 24 aa, Homo sapiens
  Table 4 sequence identifier: Q8NF50_C186
  MOD_RES (7)..(7): May or may not be conjugated to a chemical probe
RHLNVLCDVSGKGPVTACDFDLRS

SEQ ID NO: 9084 - protein, 18 aa, Homo sapiens
  Table 4 sequence identifier: Q9HB21_C389
  MOD_RES (3)..(3): May or may not be conjugated to a chemical probe
KDCDLVDLDDASLPVSDV

SEQ ID NO: 9085 - protein, 22 aa, Homo sapiens
  Table 4 sequence identifier: Q96HC4_C213
  MOD_RES (9)..(9): May or may not be conjugated to a chemical probe
RQPTVTSVCSETSQELAEGQRR

SEQ ID NO: 9086 - protein, 24 aa, Homo sapiens
  Table 4 sequence identifier: Q9UPU5_C1362
  MOD_RES (18)..(18): May or may not be conjugated to a chemical probe
RLDLVGSSQPIKESNSLCPAGIRN

SEQ ID NO: 9087 - protein, 21 aa, Homo sapiens
  Table 4 sequence identifier: Q9Y5T5_C618
  MOD_RES (15)..(15): May or may not be conjugated to a chemical probe
KVYEVVNEDPETAFCTLANRE

SEQ ID NO: 9088 - protein, 16 aa, Homo sapiens
  Table 4 sequence identifier: Q9Y570_C381
  MOD_RES (11)..(11): May or may not be conjugated to a chemical probe
RFAEPIGGFQCVFPGC

SEQ ID NO: 9089 - protein, 11 aa, Homo sapiens
  Table 4 sequence identifier: Q9NYK5_C133
  MOD_RES (3)..(3): May or may not be conjugated to a chemical probe
KDCDPGEVNKA

SEQ ID NO: 9090 - protein, 7 aa, Homo sapiens
  Table 4 sequence identifier: Q96T51_C703
  MOD_RES (2)..(2): May or may not be conjugated to a chemical probe
RCSSTAS

SEQ ID NO: 9091 - protein, 29 aa, Homo sapiens
  Table 4 sequence identifier: Q16643_C613
  MOD_RES (26)..(26): May or may not be conjugated to a chemical probe
KEGTQASEGYFSQSQEEEFAQSEELCAKA

SEQ ID NO: 9092 - protein, 32 aa, Homo sapiens
  Table 4 sequence identifier: Q9Y5B0_C429
  MOD_RES (26)..(26): May or may not be conjugated to a chemical probe
RDIWPPAQAPTSSQELAGAPEPQGSCAQGGRV

SEQ ID NO: 9093 - protein, 24 aa, Homo sapiens
  Table 4 sequence identifier: Q8N806_C260
  MOD_RES (9)..(9): May or may not be conjugated to a chemical probe
KVEQNSEPCAGSSSESDLQTVFKN

SEQ ID NO: 9094 - protein, 16 aa, Homo sapiens
  Table 4 sequence identifier: Q96K76_C856
  MOD_RES (13)..(13): May or may not be conjugated to a chemical probe
KAGGDSGNVDDDCERV

SEQ ID NO: 9095 - protein, 14 aa, Homo sapiens
  Table 4 sequence identifier: Q9UDY8_C71
  MOD_RES (4)..(4): May or may not be conjugated to a chemical probe
RLSCLDLEQCSLKV

SEQ ID NO: 9096 - protein, 14 aa, Homo sapiens
  Table 4 sequence identifier: Q8IY81_C577
  MOD_RES (11)..(11): May or may not be conjugated to a chemical probe
KQQLPQTPPSCLKT

SEQ ID NO: 9097 - protein, 26 aa, Homo sapiens
  Table 4 sequence identifier: P21333_C796
  MOD_RES (12)..(12): May or may not be conjugated to a chemical probe
KAHEPTYFTVDCAEAGQGDVSIGIKC

SEQ ID NO: 9098 - protein, 17 aa, Homo sapiens
  Table 4 sequence identifier: P11413_C446
  MOD_RES (8)..(8): May or may not be conjugated to a chemical probe
RLILDVFCGSQMHFVRS

SEQ ID NO: 9099 - protein, 10 aa, Homo sapiens
  Table 4 sequence identifier: P42575_C320
  MOD_RES (8)..(8): May or may not be conjugated to a chemical probe
KMFFIQACRG

SEQ ID NO: 9100 - protein, 9 aa, Homo sapiens
  Table 4 sequence identifier: Q04760_C61
  MOD_RES (2)..(2): May or may not be conjugated to a chemical probe
KCDFPIMKF

SEQ ID NO: 9101 - protein, 23 aa, Homo sapiens
  Table 4 sequence identifier: O00562_C259
  MOD_RES (2)..(2): May or may not be conjugated to a chemical probe
KCNTGSEGSEAQPPGKPSTEARS

SEQ ID NO: 9102 - protein, 24 aa, Homo sapiens
  Table 4 sequence identifier: P49848_C141
  MOD_RES (10)..(10): May or may not be conjugated to a chemical probe
KAHWLSIEGCQPAIPENPPPAPKE

SEQ ID NO: 9103 - protein, 24 aa, Homo sapiens
  Table 4 sequence identifier: P08567_C160
  MOD_RES (11)..(11): May or may not be conjugated to a chemical probe
KIFNHCFTGNCVIDWLVSNQSVRN

SEQ ID NO: 9104 - protein, 21 aa, Homo sapiens
  Table 4 sequence identifier: Q7Z7H8_C180
  MOD_RES (12)..(12): May or may not be conjugated to a chemical probe
RTVPFLPLLGGCIDDTILSRQ

SEQ ID NO: 9105 - protein, 14 aa, Homo sapiens
  Table 4 sequence identifier: O95786_C268
  MOD_RES (11)..(11): May or may not be conjugated to a chemical probe
KNTIICAPTGCGKT

SEQ ID NO: 9106 - protein, 31 aa, Homo sapiens; identical to SEQ ID NO: 1517
  Table 4 sequence identifier: P17655_C105
  MOD_RES (12)..(12): May or may not be conjugated to a chemical probe

SEQ ID NO: 9107 - protein, 16 aa, Homo sapiens
  Table 4 sequence identifier: O00541_C361
  MOD_RES (4)..(4): May or may not be conjugated to a chemical probe
KSLCIGATYDVTDSRI

SEQ ID NO: 9108 - protein, 9 aa, Homo sapiens
  Table 4 sequence identifier: Q8WVV9_C405
  MOD_RES (5)..(5): May or may not be conjugated to a chemical probe
RLNVCVSKQ

SEQ ID NO: 9109 - protein, 25 aa, Homo sapiens
  Table 4 sequence identifier: P45974_C335
  MOD_RES (7)..(7): May or may not be conjugated to a chemical probe
RNLGNSCYLNSVVQVLFSIPDFQRK

SEQ ID NO: 9110 - protein, 12 aa, Homo sapiens
  Table 4 sequence identifier: P14868_C203
  MOD_RES (7)..(7): May or may not be conjugated to a chemical probe
RLQSGICHLFRE

SEQ ID NO: 9111 - protein, 15 aa, Homo sapiens
  Table 4 sequence identifier: Q8WWY3_C247
  MOD_RES (5)..(5): May or may not be conjugated to a chemical probe
KMPACNIMLLGAQRK

SEQ ID NO: 9112 - protein, 23 aa, Homo sapiens
  Table 4 sequence identifier: Q9P258_C280
  MOD_RES (9)..(9): May or may not be conjugated to a chemical probe
KGNLYSFGCPEYGQLGHNSDGKF

SEQ ID NO: 9113 - protein, 10 aa, Homo sapiens
  Table 4 sequence identifier: P22087_C99
  MOD_RES (8)..(8): May or may not be conjugated to a chemical probe
RHEGVFICRG

SEQ ID NO: 9114 - protein, 18 aa, Homo sapiens
  Table 4 sequence identifier: Q8N8A2_C408
  MOD_RES (3)..(3): May or may not be conjugated to a chemical probe
RTCLHAAAAGGNVECIKL

SEQ ID NO: 9115 - protein, 19 aa, Homo sapiens
  Table 4 sequence identifier: Q96EB1_C361
  MOD_RES (7)..(7): May or may not be conjugated to a chemical probe
RLNNLICDESDVKDLAFKL

SEQ ID NO: 9116 - protein, 18 aa, Homo sapiens
  Table 4 sequence identifier: P20073_C413
  MOD_RES (6)..(6): May or may not be conjugated to a chemical probe
KTILQCALNRPAFFAERL

SEQ ID NO: 9117 - protein, 15 aa, Homo sapiens
  Table 4 sequence identifier: Q6PGP7_C1162
  MOD_RES (2)..(2): May or may not be conjugated to a chemical probe
RCLLTSAIYALQGRS

SEQ ID NO: 9118 - protein, 35 aa, Homo sapiens; identical to SEQ ID NO: 2347
  Table 4 sequence identifier: Q9Y490_C1978
  MOD_RES (6)..(6): May or may not be conjugated to a chemical probe

SEQ ID NO: 9119 - protein, 14 aa, Homo sapiens
  Table 4 sequence identifier: Q14204_C1888
  MOD_RES (2)..(2): May or may not be conjugated to a chemical probe
RCYLTMTQALEARL

SEQ ID NO: 9120 - protein, 29 aa, Homo sapiens
  Table 4 sequence identifier: Q8N8A2_C334
  MOD_RES (14)..(14): May or may not be conjugated to a chemical probe
RSQTLIQNGGEIDCVDKDGNTPLHVAARY

SEQ ID NO: 9121 - protein, 12 aa, Homo sapiens
  Table 4 sequence identifier: Q96EY4_C162
  MOD_RES (4)..(4): May or may not be conjugated to a chemical probe
RKICANDAIPKT

SEQ ID NO: 9122 - protein, 15 aa, Homo sapiens
  Table 4 sequence identifier: Q9UJX4_C203
  MOD_RES (7)..(7): May or may not be conjugated to a chemical probe
REEEVSCSGPLSQKQ

SEQ ID NO: 9123 - protein, 12 aa, Homo sapiens
  Table 4 sequence identifier: Q9Y490_C1509
  MOD_RES (10)..(10): May or may not be conjugated to a chemical probe
KHTSALCNSCRL

SEQ ID NO: 9124 - protein, 19 aa, Homo sapiens
  Table 4 sequence identifier: P07814_C1480
  MOD_RES (4)..(4): May or may not be conjugated to a chemical probe
KSLCIPFKPLCELQPGAKC

SEQ ID NO: 9125 - protein, 9 aa, Homo sapiens
  Table 4 sequence identifier: Q14152_C198
  MOD_RES (4)..(4): May or may not be conjugated to a chemical probe
RKLCDNLRM

SEQ ID NO: 9126 - protein, 28 aa, Homo sapiens
  Table 4 sequence identifier: P52306_C29
  MOD_RES (12)..(12): May or may not be conjugated to a chemical probe
KTEDSLEGCLDCLLQALAQNNTETSEKI

SEQ ID NO: 9127 - protein, 12 aa, Homo sapiens
  Table 4 sequence identifier: Q96RL1_C257
  MOD_RES (3)..(3): May or may not be conjugated to a chemical probe
RHCLPTLADAKG

SEQ ID NO: 9128 - protein, 13 aa, Homo sapiens
  Table 4 sequence identifier: Q8N4N3_C254
  MOD_RES (7)..(7): May or may not be conjugated to a chemical probe
RVKPAVCSLLPKE

SEQ ID NO: 9129 - protein, 10 aa, Homo sapiens
  Table 4 sequence identifier: Q92616_C55
  MOD_RES (4)..(4): May or may not be conjugated to a chemical probe
KLFCLTLHRY

SEQ ID NO: 9130 - protein, 13 aa, Homo sapiens
  Table 4 sequence identifier: Q14966_C652
  MOD_RES (11)..(11): May or may not be conjugated to a chemical probe
KNLEDDTLSECKQ

SEQ ID NO: 9131 - protein, 24 aa, Homo sapiens
  Table 4 sequence identifier: P40763_C687
  MOD_RES (3)..(3): May or may not be conjugated to a chemical probe
KYCRPESQEHPEADPGSAAPYLKT

SEQ ID NO: 9132 - protein, 33 aa, Homo sapiens; identical to SEQ ID NO: 550
  Table 4 sequence identifier: P22307_C94
  MOD_RES (21)..(21): May or may not be conjugated to a chemical probe

SEQ ID NO: 9133 - protein, 12 aa, Homo sapiens
  Table 4 sequence identifier: P41250_C466
  MOD_RES (3)..(3): May or may not be conjugated to a chemical probe
RSCYDLSCHARA

SEQ ID NO: 9134 - protein, 24 aa, Homo sapiens
  Table 4 sequence identifier: Q8WXH0_C5315
  MOD_RES (2)..(2): May or may not be conjugated to a chemical probe
RCQVENLQSLQDEAESSEGSWEKL

SEQ ID NO: 9135 - protein, 15 aa, Homo sapiens
  Table 4 sequence identifier: P13639_C567
  MOD_RES (9)..(9): May or may not be conjugated to a chemical probe
KDLEEDHACIPIKKS

SEQ ID NO: 9136 - protein, 14 aa, Homo sapiens
  Table 4 sequence identifier: Q99973_C171
  MOD_RES (8)..(8): May or may not be conjugated to a chemical probe
KGLDLSTCPIALKS

SEQ ID NO: 9137 - protein, 29 aa, Homo sapiens
  Table 4 sequence identifier: Q8N4C6_C1986
  MOD_RES (23)..(23): May or may not be conjugated to a chemical probe
RSTATPSPSPHAWDLQLLQQQACPMVPRE

SEQ ID NO: 9138 - protein, 35 aa, Homo sapiens; identical to SEQ ID NO: 173
  Table 4 sequence identifier: Q8TBC4_C237
  MOD_RES (27)..(27): May or may not be conjugated to a chemical probe

SEQ ID NO: 9139 - protein, 11 aa, Homo sapiens
  Table 4 sequence identifier: Q5VWQ0_C318
  MOD_RES (9)..(9): May or may not be conjugated to a chemical probe
RYLKDEQLCRL

SEQ ID NO: 9140 - protein, 21 aa, Homo sapiens
  Table 4 sequence identifier: Q96FS4_C732
  MOD_RES (3)..(3): May or may not be conjugated to a chemical probe
RVCGQTLPSLRPEAAAQLLRS

SEQ ID NO: 9141 - protein, 14 aa, Homo sapiens
  Table 4 sequence identifier: P20700_C198
  MOD_RES (2)..(2): May or may not be conjugated to a chemical probe
RCQSLTEDLEFRKS

SEQ ID NO: 9142 - protein, 17 aa, Homo sapiens
  Table 4 sequence identifier: P34949_C289
  MOD_RES (10)..(10): May or may not be conjugated to a chemical probe
KGDCVECMACSDNTVRA

SEQ ID NO: 9143 - protein, 16 aa, Homo sapiens
  Table 4 sequence identifier: Q5T1M5_C828
  MOD_RES (12)..(12): May or may not be conjugated to a chemical probe
KDEHLQQYQEVCAQRD

SEQ ID NO: 9144 - protein, 29 aa, Homo sapiens
  Table 4 sequence identifier: Q13315_C2991
  MOD_RES (26)..(26): May or may not be conjugated to a chemical probe
KALYLQQRPEDETELHPTLNADDQECKRN

SEQ ID NO: 9145 - protein, 15 aa, Homo sapiens
  Table 4 sequence identifier: Q9UIG0_C953
  MOD_RES (12)..(12): May or may not be conjugated to a chemical probe
KDHTVSGDEDYCPRS

SEQ ID NO: 9146 - protein, 12 aa, Homo sapiens
  Table 4 sequence identifier: Q9ULX6_C128
  MOD_RES (8)..(8): May or may not be conjugated to a chemical probe
RYDSYESCDSRA

SEQ ID NO: 9147 - protein, 10 aa, Homo sapiens
  Table 4 sequence identifier: Q92620_C865
  MOD_RES (7)..(7): May or may not be conjugated to a chemical probe
RTGPGQCFRL

SEQ ID NO: 9148 - protein, 10 aa, Homo sapiens
  Table 4 sequence identifier: Q7L5D6_C160
  MOD_RES (6)..(6): May or may not be conjugated to a chemical probe
KEQNYCESRY

SEQ ID NO: 9149 - protein, 19 aa, Homo sapiens
  Table 4 sequence identifier: P34932_C417
  MOD_RES (13)..(13): May or may not be conjugated to a chemical probe
RWNSPAEEGSSDCEVFSKN

SEQ ID NO: 9150 - protein, 12 aa, Homo sapiens
  Table 4 sequence identifier: Q7KZ85_C1435
  MOD_RES (6)..(6): May or may not be conjugated to a chemical probe
KYYQDCSGGDRK

SEQ ID NO: 9151 - protein, 10 aa, Homo sapiens
  Table 4 sequence identifier: Q9Y2Z2_C315
  MOD_RES (3)..(3): May or may not be conjugated to a chemical probe
RYCPSIESKV

SEQ ID NO: 9152 - protein, 20 aa, Homo sapiens
  Table 4 sequence identifier: P08514_C87
  MOD_RES (16)..(16): May or may not be conjugated to a chemical probe
RTLGPSQEETGGVFLCPWRA

SEQ ID NO: 9153 - protein, 16 aa, Homo sapiens
  Table 4 sequence identifier: O75821_C139
  MOD_RES (6)..(6): May or may not be conjugated to a chemical probe
KEDLNCQEEEDPMNKL

SEQ ID NO: 9154 - protein, 26 aa, Homo sapiens
  Table 4 sequence identifier: Q9Y265_C141
  MOD_RES (14)..(14): May or may not be conjugated to a chemical probe
KEVYEGEVTELTPCETENPMGGYGKT

SEQ ID NO: 9155 - protein, 16 aa, Homo sapiens
  Table 4 sequence identifier: Q969M7_C50
  MOD_RES (12)..(12): May or may not be conjugated to a chemical probe
KEVAELEANLPCTCKV

SEQ ID NO: 9156 - protein, 16 aa, Homo sapiens
  Table 4 sequence identifier: H3BSR4_C50
  MOD_RES (12)..(12): May or may not be conjugated to a chemical probe
KEVAELEANLPCTCKV

SEQ ID NO: 9157 - protein, 13 aa, Homo sapiens
  Table 4 sequence identifier: P25098_C120
  MOD_RES (6)..(6): May or may not be conjugated to a chemical probe
KELLACSHPFSKS

SEQ ID NO: 9158 - protein, 13 aa, Homo sapiens
  Table 4 sequence identifier: O60831_C28
  MOD_RES (8)..(8): May or may not be conjugated to a chemical probe
RLAAPDPCDPQRW

SEQ ID NO: 9159 - protein, 13 aa, Homo sapiens
  Table 4 sequence identifier: O00429_C367
  MOD_RES (3)..(3): May or may not be conjugated to a chemical probe
RICYIFHETFGRT

SEQ ID NO: 9160 - protein, 15 aa, Homo sapiens
  Table 4 sequence identifier: Q7Z5K2_C160
  MOD_RES (12)..(12): May or may not be conjugated to a chemical probe
RIVEDDASISSCNKL

SEQ ID NO: 9161 - protein, 14 aa, Homo sapiens
  Table 4 sequence identifier: P13807_C699
  MOD_RES (5)..(5): May or may not be conjugated to a chemical probe
RRASCTSSTSGSKR

SEQ ID NO: 9162 - protein, 29 aa, Homo sapiens
  Table 4 sequence identifier: Q96CP2_C132
  MOD_RES (22)..(22): May or may not be conjugated to a chemical probe
RTEDSGLAAGPPEAAGENFAPCSVAPGKS

SEQ ID NO: 9163 - protein, 14 aa, Homo sapiens
  Table 4 sequence identifier: P26651_C250
  MOD_RES (9)..(9): May or may not be conjugated to a chemical probe
RRDPTPVCCPSCRR

SEQ ID NO: 9164 - protein, 12 aa, Homo sapiens
  Table 4 sequence identifier: Q92974_C478
  MOD_RES (7)..(7): May or may not be conjugated to a chemical probe
KLIHDGCLLWKT

SEQ ID NO: 9165 - protein, 11 aa, Homo sapiens
  Table 4 sequence identifier: Q9H4B7_C303
  MOD_RES (7)..(7): May or may not be conjugated to a chemical probe
RNTMAACDLRR

SEQ ID NO: 9166 - protein, 12 aa, Homo sapiens
  Table 4 sequence identifier: Q9Y5A7_C52
  MOD_RES (5)..(5): May or may not be conjugated to a chemical probe
RLECCENEVEKV

SEQ ID NO: 9167 - protein, 28 aa, Homo sapiens
  Table 4 sequence identifier: Q8IZD4_C369
  MOD_RES (12)..(12): May or may not be conjugated to a chemical probe
KLQSTPGAANKCDPSTPAPASSAALNRS

SEQ ID NO: 9168 - protein, 21 aa, Homo sapiens
  Table 4 sequence identifier: Q13422_C223
  MOD_RES (2)..(2): May or may not be conjugated to a chemical probe
RCHNYLESMGLPGTLYPVIKE

SEQ ID NO: 9169 - protein, 30 aa, Homo sapiens
  Table 4 sequence identifier: Q15181_C270
  MOD_RES (11)..(11): May or may not be conjugated to a chemical probe
RAIVDALPPPCESACTVPTDVDKWFHHQKN

SEQ ID NO: 9170 - protein, 12 aa, Homo sapiens
  Table 4 sequence identifier: P49916_C929
  MOD_RES (8)..(8): May or may not be conjugated to a chemical probe
KAADETLCQTKV

SEQ ID NO: 9171 - protein, 24 aa, Homo sapiens
  Table 4 sequence identifier: Q9Y6C9_C49
  MOD_RES (4)..(4): May or may not be conjugated to a chemical probe
RQVCQLPGLFSYAQHIASIDGRRG

SEQ ID NO: 9172 - protein, 30 aa, Homo sapiens
  Table 4 sequence identifier: O15265_C639
  MOD_RES (24)..(24): May or may not be conjugated to a chemical probe
KSVPAHGTTLNAQPAASGAMDPVCSMQSRQ

SEQ ID NO: 9173 - protein, 30 aa, Homo sapiens
  Table 4 sequence identifier: Q9BQ67_C11
  MOD_RES (3)..(3): May or may not be conjugated to a chemical probe
RTCETGEPMEAESGDTSSEGPAQVYLPGRG

SEQ ID NO: 9174 - protein, 22 aa, Homo sapiens
  Table 4 sequence identifier: Q7Z6Z7_C3658
  MOD_RES (4)..(4): May or may not be conjugated to a chemical probe
RAQCETLSPDGLPEEQPQTTKL

SEQ ID NO: 9175 - protein, 16 aa, Homo sapiens
  Table 4 sequence identifier: Q9BTE3_C325
  MOD_RES (12)..(12): May or may not be conjugated to a chemical probe
KLQHINPLLPACLNKE

SEQ ID NO: 9176 - protein, 16 aa, Homo sapiens
  Table 4 sequence identifier: Q92917_C137
  MOD_RES (3)..(3): May or may not be conjugated to a chemical probe
KGCTPSGEGADSEPRA

SEQ ID NO: 9177 - protein, 15 aa, Homo sapiens
  Table 4 sequence identifier: Q9BSA9_C32
  MOD_RES (11)..(11): May or may not be conjugated to a chemical probe
RDEDAGEGIQCSQRM

SEQ ID NO: 9178 - protein, 23 aa, Homo sapiens
  Table 4 sequence identifier: Q9H9A5_C504
  MOD_RES (19)..(19): May or may not be conjugated to a chemical probe
KNSNQLGGNTESSESSETCSSKS

SEQ ID NO: 9179 - protein, 14 aa, Homo sapiens
  Table 4 sequence identifier: P0CB43_C51
  MOD_RES (9)..(9): May or may not be conjugated to a chemical probe
RHVLALTGCGPGRA

SEQ ID NO: 9180 - protein, 29 aa, Homo sapiens
  Table 4 sequence identifier: Q9BWU0_C125
  MOD_RES (24)..(24): May or may not be conjugated to a chemical probe
KEGPTALQDSNSGEPDIPPPQPDCGDFRS

SEQ ID NO: 9181 - protein, 12 aa, Homo sapiens
  Table 4 sequence identifier: Q96FW1_C91
  MOD_RES (8)..(8): May or may not be conjugated to a chemical probe
KTRPDGNCFYRA

SEQ ID NO: 9182 - protein, 25 aa, Homo sapiens
  Table 4 sequence identifier: Q9UEY8_C73
  MOD_RES (17)..(17): May or may not be conjugated to a chemical probe
RVTQILQSPAFREDLECLIQEQMKK

SEQ ID NO: 9183 - protein, 16 aa, Homo sapiens
  Table 4 sequence identifier: Q8N4N3_C308
  MOD_RES (2)..(2): May or may not be conjugated to a chemical probe
RCLELSDDTCYLDAKS

SEQ ID NO: 9184 - protein, 12 aa, Homo sapiens
  Table 4 sequence identifier: Q9H3M7_C170
  MOD_RES (4)..(4): May or may not be conjugated to a chemical probe
KVSCMFIPDGRV

SEQ ID NO: 9185 - protein, 22 aa, Homo sapiens
  Table 4 sequence identifier: Q8N9N7_C128
  MOD_RES (18)..(18): May or may not be conjugated to a chemical probe
KTLSLSGNQLGALPPQLCSLRH

SEQ ID NO: 9186 - protein, 27 aa, Homo sapiens
  Table 4 sequence identifier: I3L1I5_C144
  MOD_RES (22)..(22): May or may not be conjugated to a chemical probe
KTWTQGCLSGGGTPAESPGKECDSPKK

SEQ ID NO: 9187 - protein, 57 aa, Homo sapiens
  Table 4 sequence identifier: Q7L2J0_C54
  MOD_RES (11)..(11): May or may not be conjugated to a chemical probe
RGGTERGPGRCAPSAGSPAAAVGRESPGAAATSSSGPQAQQHRGGGPQAQSHGEARL

SEQ ID NO: 9188 - protein, 44 aa, Homo sapiens
  Table 4 sequence identifier: Q9Y2H0_C800
  MOD_RES (41)..(41): May or may not be conjugated to a chemical probe
RNLSYGDNSDPALEASSLPPPDPWLETSSSSPAEPAQPGACRRD

SEQ ID NO: 9189 - protein, 15 aa, Homo sapiens
  Table 4 sequence identifier: Q9Y314_C8
  MOD_RES (3)..(3): May or may not be conjugated to a chemical probe
KNCTAGAVYTYHEKK

SEQ ID NO: 9190 - protein, 16 aa, Homo sapiens
  Table 4 sequence identifier: Q9Y490_C1927
  MOD_RES (9)..(9): May or may not be conjugated to a chemical probe
RVQELGHGCAALVTKA

SEQ ID NO: 9191 - protein, 19 aa, Homo sapiens
  Table 4 sequence identifier: Q8N2G8_C502
  MOD_RES (7)..(7): May or may not be conjugated to a chemical probe
RAALAACPSSPFPPAMPRV

SEQ ID NO: 9192 - protein, 44 aa, Homo sapiens; identical to SEQ ID NO: 489
  Table 4 sequence identifier: P53992_C78
  MOD_RES (18)..(18): May or may not be conjugated to a chemical probe

SEQ ID NO: 9193 - protein, 14 aa, Homo sapiens
  Table 4 sequence identifier: P60891_C91
  MOD_RES (8)..(8): May or may not be conjugated to a chemical probe
RVTAVIPCFPYARQ

SEQ ID NO: 9194 - protein, 14 aa, Homo sapiens
  Table 4 sequence identifier: P11908_C91
  MOD_RES (8)..(8): May or may not be conjugated to a chemical probe
RVTAVIPCFPYARQ

SEQ ID NO: 9195 - protein, 14 aa, Homo sapiens
  Table 4 sequence identifier: P21108_C91
  MOD_RES (8)..(8): May or may not be conjugated to a chemical probe
RVTAVIPCFPYARQ

SEQ ID NO: 9196 - protein, 28 aa, Homo sapiens
  Table 4 sequence identifier: Q9UPN7_C216
  MOD_RES (23)..(23): May or may not be conjugated to a chemical probe
RLIEQIHPSKDENQHSNASQSLCDIIRL

SEQ ID NO: 9197 - protein, 11 aa, Homo sapiens
  Table 4 sequence identifier: Q63HN8_C3084
  MOD_RES (9)..(9): May or may not be conjugated to a chemical probe
KDQEYTQLCRN

SEQ ID NO: 9198 - protein, 10 aa, Homo sapiens
  Table 4 sequence identifier: P61247_C111
  MOD_RES (5)..(5): May or may not be conjugated to a chemical probe
RDKMCSMVKK

SEQ ID NO: 9199 - protein, 11 aa, Homo sapiens
  Table 4 sequence identifier: P18583_C2070
  MOD_RES (8)..(8): May or may not be conjugated to a chemical probe
KANAAAMCAKA

SEQ ID NO: 9200 - protein, 16 aa, Homo sapiens
  Table 4 sequence identifier: P28331_C727
  MOD_RES (16)..(16): May or may not be conjugated to a chemical probe
KAVTEGAQAVEEPSIC

SEQ ID NO: 9201 - protein, 9 aa, Homo sapiens
  Table 4 sequence identifier: P46063_C478
  MOD_RES (6)..(6): May or may not be conjugated to a chemical probe
KMCDNCCKD

SEQ ID NO: 9202 - protein, 10 aa, Homo sapiens
  Table 4 sequence identifier: Q7L2J0_C429
  MOD_RES (5)..(5): May or may not be conjugated to a chemical probe
RNPSCEDGRL

SEQ ID NO: 9203 - protein, 14 aa, Homo sapiens
  Table 4 sequence identifier: Q9NR45_C287
  MOD_RES (10)..(10): May or may not be conjugated to a chemical probe
KQLLPCEMACNEKL

SEQ ID NO: 9204 - protein, 8 aa, Homo sapiens
  Table 4 sequence identifier: Q92945_C379
  MOD_RES (2)..(2): May or may not be conjugated to a chemical probe
RCEHAARI

SEQ ID NO: 9205 - protein, 18 aa, Homo sapiens
  Table 4 sequence identifier: O75934_C132
  MOD_RES (13)..(13): May or may not be conjugated to a chemical probe
RIENLELMSQHGCNAWKV

SEQ ID NO: 9206 - protein, 9 aa, Homo sapiens
  Table 4 sequence identifier: P42229_C101
  MOD_RES (2)..(2): May or may not be conjugated to a chemical probe
RCPLELVRC

SEQ ID NO: 9207 - protein, 11 aa, Homo sapiens
  Table 4 sequence identifier: Q96SI9_C195
  MOD_RES (2)..(2): May or may not be conjugated to a chemical probe
KCLNALASLRH

SEQ ID NO: 9208 - protein, 16 aa, Homo sapiens
  Table 4 sequence identifier: P78527_C1629
  MOD_RES (2)..(2): May or may not be conjugated to a chemical probe
KCDSWWAKDSPLETKM

SEQ ID NO: 9209 - protein, 9 aa, Homo sapiens
  Table 4 sequence identifier: P28715_C12
  MOD_RES (5)..(5): May or may not be conjugated to a chemical probe
KLLECSGRQ

SEQ ID NO: 9210 - protein, 11 aa, Homo sapiens
  Table 4 sequence identifier: O60318_C1839
  MOD_RES (5)..(5): May or may not be conjugated to a chemical probe
RSTECAQEGRI

SEQ ID NO: 9211 - protein, 16 aa, Homo sapiens
  Table 4 sequence identifier: P43354_C190
  MOD_RES (12)..(12): May or may not be conjugated to a chemical probe
KQSPPGTPVSSCQMRF

SEQ ID NO: 9212 - protein, 12 aa, Homo sapiens
  Table 4 sequence identifier: Q562E7_C215
  MOD_RES (6)..(6): May or may not be conjugated to a chemical probe
RGSPACPSLLRA

SEQ ID NO: 9213 - protein, 10 aa, Homo sapiens
  Table 4 sequence identifier: P61247_C139
  MOD_RES (4)..(4): May or may not be conjugated to a chemical probe
RLFCVGFTKK

SEQ ID NO: 9214 - protein, 9 aa, Homo sapiens
  Table 4 sequence identifier: P19174_C646
  MOD_RES (2)..(2): May or may not be conjugated to a chemical probe
RCNEFEMRL

SEQ ID NO: 9215 - protein, 9 aa, Homo sapiens
  Table 4 sequence identifier: Q8IUR7_C283
  MOD_RES (5)..(5): May or may not be conjugated to a chemical probe
KTLPCLVRM

SEQ ID NO: 9216 - protein, 14 aa, Homo sapiens
  Table 4 sequence identifier: O75828_C227
  MOD_RES (8)..(8): May or may not be conjugated to a chemical probe
RILVNACCPGPVKT

SEQ ID NO: 9217 - protein, 20 aa, Homo sapiens
  Table 4 sequence identifier: Q9NR30_C291
  MOD_RES (6)..(6): May or may not be conjugated to a chemical probe
KLSVACFYGGTPYGGQFERM

SEQ ID NO: 9218 - protein, 12 aa, Homo sapiens
  Table 4 sequence identifier: Q9HCK8_C1655
  MOD_RES (7)..(7): May or may not be conjugated to a chemical probe
RADPALCFLEKV

SEQ ID NO: 9219 - protein, 16 aa, Homo sapiens
  Table 4 sequence identifier: Q5T4S7_C3864
  MOD_RES (8)..(8): May or may not be conjugated to a chemical probe
RALSVLGCGHTSSTKC

SEQ ID NO: 9220 - protein, 16 aa, Homo sapiens
  Table 4 sequence identifier: Q9H869_C290
  MOD_RES (12)..(12): May or may not be conjugated to a chemical probe
KVFMYPELLPVCSLKA

SEQ ID NO: 9221 - protein, 16 aa, Homo sapiens
  Table 4 sequence identifier: Q3T8J9_C813
  MOD_RES (12)..(12): May or may not be conjugated to a chemical probe
KVFMYPELLPVCSLKA

SEQ ID NO: 9222 - protein, 26 aa, Homo sapiens
  Table 4 sequence identifier: P11161_C234
  MOD_RES (23)..(23): May or may not be conjugated to a chemical probe
KPATDPGLFPMIPDYPGFFPSQCQRD

SEQ ID NO: 9223 - protein, 20 aa, Homo sapiens
  Table 4 sequence identifier: P50579_C436
  MOD_RES (4)..(4): May or may not be conjugated to a chemical probe
KNLCDLGIVDPYPPLCDIKG

SEQ ID NO: 9224 - protein, 21 aa, Homo sapiens
  Table 4 sequence identifier: P42229_C126
  MOD_RES (6)..(6): May or may not be conjugated to a chemical probe
REANNCSSPAGILVDAMSQKH

SEQ ID NO: 9225 - protein, 14 aa, Homo sapiens
  Table 4 sequence identifier: Q15545_C72
  MOD_RES (7)..(7): May or may not be conjugated to a chemical probe
KLVDLPCVMESLKT

SEQ ID NO: 9226 - protein, 16 aa, Homo sapiens
  Table 4 sequence identifier: Q9UM19_C187
  MOD_RES (12)..(12): May or may not be conjugated to a chemical probe
KSDPSIVLLLQCDMQK

SEQ ID NO: 9227 - protein, 25 aa, Homo sapiens
  Table 4 sequence identifier: Q92989_C338
  MOD_RES (11)..(11): May or may not be conjugated to a chemical probe
KVGAPTIPDSCLPLGMSQEDNQLKL

SEQ ID NO: 9228 - protein, 15 aa, Homo sapiens
  Table 4 sequence identifier: Q5VV42_C138
  MOD_RES (7)..(7): May or may not be conjugated to a chemical probe
KIVLAGCVPQAQPRQ

SEQ ID NO: 9229 - protein, 10 aa, Homo sapiens
  Table 4 sequence identifier: Q9BVQ7_C580
  MOD_RES (4)..(4): May or may not be conjugated to a chemical probe
KTGCDVQERV

SEQ ID NO: 9230 - protein, 14 aa, Homo sapiens
  Table 4 sequence identifier: P24928_C451
  MOD_RES (4)..(4): May or may not be conjugated to a chemical probe
RHMCDGDIVIFNRQ

SEQ ID NO: 9231 - protein, 13 aa, Homo sapiens
  Table 4 sequence identifier: Q14573_C2668
  MOD_RES (10)..(10): May or may not be conjugated to a chemical probe
RLGFVDVQNCISR

SEQ ID NO: 9232 - protein, 12 aa, Homo sapiens
  Table 4 sequence identifier: Q9NUU7_C392
  MOD_RES (9)..(9): May or may not be conjugated to a chemical probe
KVLVTTNVCARG

SEQ ID NO: 9233 - protein, 12 aa, Homo sapiens
  Table 4 sequence identifier: Q9UMR2_C393
  MOD_RES (9)..(9): May or may not be conjugated to a chemical probe
KVLVTTNVCARG

SEQ ID NO: 9234 - protein, 12 aa, Homo sapiens
  Table 4 sequence identifier: P49368_C398
  MOD_RES (10)..(10): May or may not be conjugated to a chemical probe
RNLQDAMQVCRN

SEQ ID NO: 9235 - protein, 17 aa, Homo sapiens
  Table 4 sequence identifier: P0DJD1_C348
  MOD_RES (14)..(14): May or may not be conjugated to a chemical probe
KGEAGQNLLEMMACDRL

SEQ ID NO: 9236 - protein, 27 aa, Homo sapiens
  Table 4 sequence identifier: Q8TF42_C367
  MOD_RES (19)..(19): May or may not be conjugated to a chemical probe
RRPYEDQGLGETTPLTIICQPMQPLRV

SEQ ID NO: 9237 - protein, 12 aa, Homo sapiens
  Table 4 sequence identifier: Q9BWG4_C81
  MOD_RES (4)..(4): May or may not be conjugated to a chemical probe
REACEHSGEAKA

SEQ ID NO: 9238 - protein, 7 aa, Homo sapiens
  Table 4 sequence identifier: P50995_C501
  MOD_RES (3)..(3): May or may not be conjugated to a chemical probe
KICGGND

SEQ ID NO: 9239 - protein, 11 aa, Homo sapiens
  Table 4 sequence identifier: Q9UPP1_C684
  MOD_RES (5)..(5): May or may not be conjugated to a chemical probe
RAKPCSDPNRV

SEQ ID NO: 9240 - protein, 22 aa, Homo sapiens
  Table 4 sequence identifier: Q9UQ35_C1036
  MOD_RES (17)..(17): May or may not be conjugated to a chemical probe
KSKDSLVQSCPGSLSLCAGVKS

SEQ ID NO: 9241 - protein, 10 aa, Homo sapiens
  Table 4 sequence identifier: Q9Y6A5_C749
  MOD_RES (2)..(2): May or may not be conjugated to a chemical probe
KCVEDYLARI

SEQ ID NO: 9242 - protein, 21 aa, Homo sapiens
  Table 4 sequence identifier: P13489_C248
  MOD_RES (11)..(11): May or may not be conjugated to a chemical probe
KLGDVGMAELCPGLLHPSSRL

SEQ ID NO: 9243 - protein, 37 aa, Homo sapiens
  Table 4 sequence identifier: Q66K74_C588
  MOD_RES (2)..(2): May or may not be conjugated to a chemical probe
RCGEASPPSAACGSPASQLVATPSLELGPIPAGEEKA

SEQ ID NO: 9244 - protein, 17 aa, Homo sapiens
  Table 4 sequence identifier: Q16881_C209
  MOD_RES (8)..(8): May or may not be conjugated to a chemical probe
RWGLGGTCVNVGCIPKK

SEQ ID NO: 9245 - protein, 17 aa, Homo sapiens
  Table 4 sequence identifier: H0YBQ0_C258
  MOD_RES (8)..(8): May or may not be conjugated to a chemical probe
RWGLGGTCVNVGCIPKK

SEQ ID NO: 9246 - protein, 17 aa, Homo sapiens
  Table 4 sequence identifier: Q9NNW7_C86
  MOD_RES (8)..(8): May or may not be conjugated to a chemical probe
RWGLGGTCVNVGCIPKK

SEQ ID NO: 9247 - protein, 13 aa, Homo sapiens
  Table 4 sequence identifier: P78527_C1499
  MOD_RES (3)..(3): May or may not be conjugated to a chemical probe
RQCLPSLDLSCKQ

SEQ ID NO: 9248 - protein, 9 aa, Homo sapiens
  Table 4 sequence identifier: Q9UGR2_C956
  MOD_RES (6)..(6): May or may not be conjugated to a chemical probe
KDMLLCPRD

SEQ ID NO: 9249 - protein, 15 aa, Homo sapiens
  Table 4 sequence identifier: P49903_C71
  MOD_RES (9)..(9): May or may not be conjugated to a chemical probe
RLGIGMDTCVIPLRH

SEQ ID NO: 9250 - protein, 12 aa, Homo sapiens
  Table 4 sequence identifier: O14976_C87
  MOD_RES (8)..(8): May or may not be conjugated to a chemical probe
RAIIQEVCFMKK

SEQ ID NO: 9251 - protein, 14 aa, Homo sapiens
  Table 4 sequence identifier: Q86WB0_C406
  MOD_RES (3)..(3): May or may not be conjugated to a chemical probe
RLCSSSSSDTSSRS

SEQ ID NO: 9252 - protein, 14 aa, Homo sapiens
  Table 4 sequence identifier: Q9H9A6_C23
  MOD_RES (3)..(3): May or may not be conjugated to a chemical probe
RDCGTSVPQGLLKA

SEQ ID NO: 9253 - protein, 16 aa, Homo sapiens
  Table 4 sequence identifier: Q3KQU3_C373
  MOD_RES (11)..(11): May or may not be conjugated to a chemical probe
RSASASPLTPCSVTRS

SEQ ID NO: 9254 - protein, 10 aa, Homo sapiens
  Table 4 sequence identifier: Q9H4L5_C24
  MOD_RES (6)..(6): May or may not be conjugated to a chemical probe
RSTSSCSSKQ

SEQ ID NO: 9255 - protein, 33 aa, Homo sapiens
  Table 4 sequence identifier: P27987_C561
  MOD_RES (3)..(3): May or may not be conjugated to a chemical probe
KACSPSNIPAVIITDMGTQEDGALEETQGSPRG

SEQ ID NO: 9256 - protein, 24 aa, Homo sapiens
  Table 4 sequence identifier: Q9Y520_C177
  MOD_RES (21)..(21): May or may not be conjugated to a chemical probe
KETNDDNYGPGPSLRPPNVACWRD

SEQ ID NO: 9257 - protein, 15 aa, Homo sapiens
  Table 4 sequence identifier: P53041_C77
  MOD_RES (4)..(4): May or may not be conjugated to a chemical probe
RTECYGYALGDATRA

SEQ ID NO: 9258 - protein, 18 aa, Homo sapiens
  Table 4 sequence identifier: Q9Y2H0_C726
  MOD_RES (16)..(16): May or may not be conjugated to a chemical probe
RRDTDSDTQDANDSSCKS

SEQ ID NO: 9259 - protein, 11 aa, Homo sapiens
  Table 4 sequence identifier: P21580_C54
  MOD_RES (3)..(3): May or may not be conjugated to a chemical probe
RTCQFCPQFRE

SEQ ID NO: 9260 - protein, 14 aa, Homo sapiens
  Table 4 sequence identifier: Q15334_C505
  MOD_RES (4)..(4): May or may not be conjugated to a chemical probe
KVGCFDPYSDDPRL

SEQ ID NO: 9261 - protein, 16 aa, Homo sapiens
  Table 4 sequence identifier: O15111_C406
  MOD_RES (6)..(6): May or may not be conjugated to a chemical probe
RSLSDCVNYIVQDSKI

SEQ ID NO: 9262 - protein, 14 aa, Homo sapiens
  Table 4 sequence identifier: Q14149_C797
  MOD_RES (4)..(4): May or may not be conjugated to a chemical probe
KAECSQCSNNESKS

SEQ ID NO: 9263 - protein, 14 aa, Homo sapiens
  Table 4 sequence identifier: O00329_C219
  MOD_RES (10)..(10): May or may not be conjugated to a chemical probe
KDVPLALMACALRK

SEQ ID NO: 9264 - protein, 11 aa, Homo sapiens
  Table 4 sequence identifier: Q9NPD3_C97
  MOD_RES (3)..(3): May or may not be conjugated to a chemical probe
KSCEMGLQLRQ

SEQ ID NO: 9265 - protein, 20 aa, Homo sapiens
  Table 4 sequence identifier: P98171_C527
  MOD_RES (17)..(17): May or may not be conjugated to a chemical probe
KFIQSSGQPVPLVVESCIRF

SEQ ID NO: 9266 - protein, 20 aa, Homo sapiens
  Table 4 sequence identifier: Q8NFI3_C454
  MOD_RES (5)..(5): May or may not be conjugated to a chemical probe
RTHCCLEDAWHGGSSLLVRG

SEQ ID NO: 9267 - protein, 14 aa, Homo sapiens
  Table 4 sequence identifier: Q13342_C686
  MOD_RES (11)..(11): May or may not be conjugated to a chemical probe
KSQNNSSVDPCMRN

SEQ ID NO: 9268 - protein, 14 aa, Homo sapiens
  Table 4 sequence identifier: Q9H930_C399
  MOD_RES (11)..(11): May or may not be conjugated to a chemical probe
KSQNNSSVDPCMRN

SEQ ID NO: 9269 - protein, 14 aa, Homo sapiens
  Table 4 sequence identifier: Q9C0B0_C696
  MOD_RES (9)..(9): May or may not be conjugated to a chemical probe
RASAAGAECELARE

SEQ ID NO: 9270 - protein, 9 aa, Homo sapiens
  Table 4 sequence identifier: Q8TB03_C12
  MOD_RES (4)..(4): May or may not be conjugated to a chemical probe
RLNCAEYKN

SEQ ID NO: 9271 - protein, 13 aa, Homo sapiens
  Table 4 sequence identifier: P21580_C767
  MOD_RES (5)..(5): May or may not be conjugated to a chemical probe
RAPACDHFGNAKC

SEQ ID NO: 9272 - protein, 13 aa, Homo sapiens
  Table 4 sequence identifier: O94906_C698
  MOD_RES (7)..(7): May or may not be conjugated to a chemical probe
RAAQDLCEEALRH

SEQ ID NO: 9273 - protein, 12 aa, Homo sapiens
  Table 4 sequence identifier: P43304_C385
  MOD_RES (6)..(6): May or may not be conjugated to a chemical probe
RNYLSCDVEVRR

SEQ ID NO: 9274 - protein, 23 aa, Homo sapiens
  Table 4 sequence identifier: Q9H4E7_C267
  MOD_RES (11)..(11): May or may not be conjugated to a chemical probe
RGIIPLDAHCCVEVLPDRDGKRC

SEQ ID NO: 9275 - protein, 17 aa, Homo sapiens
  Table 4 sequence identifier: Q8NEM7_C298
  MOD_RES (4)..(4): May or may not be conjugated to a chemical probe
RSPCNLAIPSEVDVEKY

SEQ ID NO: 9276 - protein, 23 aa, Homo sapiens
  Table 4 sequence identifier: O75367_C286
  MOD_RES (16)..(16): May or may not be conjugated to a chemical probe
KFVIHCNSPVWGADKCEELLEKT

SEQ ID NO: 9277 - protein, 11 aa, Homo sapiens
  Table 4 sequence identifier: O00148_C197
  MOD_RES (8)..(8): May or may not be conjugated to a chemical probe
KHFVLDECDKM

SEQ ID NO: 9278 - protein, 12 aa, Homo sapiens
  Table 4 sequence identifier: P40926_C275
  MOD_RES (7)..(7): May or may not be conjugated to a chemical probe
KEGVVECSFVKS

SEQ ID NO: 9279 - protein, 31 aa, Homo sapiens
  Table 4 sequence identifier: Q6P2E9_C249
  MOD_RES (16)..(16): May or may not be conjugated to a chemical probe
RIIWCPFIPEESEDCCEESSPTVALLHEDRA

SEQ ID NO: 9280 - protein, 11 aa, Homo sapiens
  Table 4 sequence identifier: Q9Y6K9_C54
  MOD_RES (2)..(2): May or may not be conjugated to a chemical probe
RCLEENQELRD

SEQ ID NO: 9281 - protein, 13 aa, Homo sapiens
  Table 4 sequence identifier: Q8TDB6_C159
  MOD_RES (8)..(8): May or may not be conjugated to a chemical probe
RAYITTLCPSIRK

SEQ ID NO: 9282 - protein, 11 aa, Homo sapiens
  Table 4 sequence identifier: Q5SSJ5_C359
  MOD_RES (3)..(3): May or may not be conjugated to a chemical probe
KTCSTTALKKY

SEQ ID NO: 9283 - protein, 18 aa, Homo sapiens
  Table 4 sequence identifier: P41252_C87
  MOD_RES (6)..(6): May or may not be conjugated to a chemical probe
RFGWDCHGLPVEYEIDKT

SEQ ID NO: 9284 - protein, 17 aa, Homo sapiens
  Table 4 sequence identifier: P28838_C445
  MOD_RES (6)..(6): May or may not be conjugated to a chemical probe
RQVVDCQLADVNNIGKY

SEQ ID NO: 9285 - protein, 14 aa, Homo sapiens
  Table 4 sequence identifier: P62979_C144
  MOD_RES (2)..(2): May or may not be conjugated to a chemical probe
KCCLTYCFNKPEDK

SEQ ID NO: 9286 - protein, 17 aa, Homo sapiens
  Table 4 sequence identifier: Q29RF7_C1084
  MOD_RES (11)..(11): May or may not be conjugated to a chemical probe
KLYTVCDVALCVINSKS

SEQ ID NO: 9287 - protein, 9 aa, Homo sapiens
  Table 4 sequence identifier: Q9UPN7_C437
  MOD_RES (7)..(7): May or may not be conjugated to a chemical probe
KHLLQQCRL

SEQ ID NO: 9288 - protein, 8 aa, Homo sapiens
  Table 4 sequence identifier: Q04206_C38
  MOD_RES (4)..(4): May or may not be conjugated to a chemical probe
RYKCEGRS

SEQ ID NO: 9289 - protein, 15 aa, Homo sapiens
  Table 4 sequence identifier: Q9BTT0_C87
  MOD_RES (2)..(2): May or may not be conjugated to a chemical probe
KCPNLTYLNLSGNKI

SEQ ID NO: 9290 - protein, 11 aa, Homo sapiens
  Table 4 sequence identifier: Q6ZMZ3_C251
  MOD_RES (3)..(3): May or may not be conjugated to a chemical probe
RNCKLPITQRL

SEQ ID NO: 9291 - protein, 17 aa, Homo sapiens
  Table 4 sequence identifier: Q8N201_C969
  MOD_RES (8)..(8): May or may not be conjugated to a chemical probe
KADEQTTCEVLDYFLRR

SEQ ID NO: 9292 - protein, 15 aa, Homo sapiens
  Table 4 sequence identifier: Q7Z591_C1078
  MOD_RES (6)..(6): May or may not be conjugated to a chemical probe
RDQAICELQEEVSRL

SEQ ID NO: 9293 - protein, 20 aa, Homo sapiens
  Table 4 sequence identifier: Q9ULT8_C1995
  MOD_RES (9)..(9): May or may not be conjugated to a chemical probe
KAGNGQNSCGVEDVLQLLRI

SEQ ID NO: 9294 - protein, 20 aa, Homo sapiens
  Table 4 sequence identifier: Q8IZL8_C239
  MOD_RES (16)..(16): May or may not be conjugated to a chemical probe
RVDALSPQLQQLACECYSRL

SEQ ID NO: 9295 - protein, 17 aa, Homo sapiens
  Table 4 sequence identifier: Q7Z6I6_C1021
  MOD_RES (5)..(5): May or may not be conjugated to a chemical probe
RTQTCTEGGDYCLIPRT

SEQ ID NO: 9296 - protein, 19 aa, Homo sapiens
  Table 4 sequence identifier: Q8NDX1_C988
  MOD_RES (4)..(4): May or may not be conjugated to a chemical probe
RLHCPSDALDLWEEQLGRE

SEQ ID NO: 9297 - protein, 14 aa, Homo sapiens
  Table 4 sequence identifier: Q92598_C658
  MOD_RES (4)..(4): May or may not be conjugated to a chemical probe
KFICEQDHQNFLRL

SEQ ID NO: 9298 - protein, 23 aa, Homo sapiens
  Table 4 sequence identifier: Q15020_C537
  MOD_RES (5)..(5): May or may not be conjugated to a chemical probe
RAVQCTSDYPEHVCEVLLTMERT

SEQ ID NO: 9299 - protein, 20 aa, Homo sapiens
  Table 4 sequence identifier: Q9UJC3_C432
  MOD_RES (2)..(2): May or may not be conjugated to a chemical probe
RCSQVQQDHLNQTDASATKS

SEQ ID NO: 9300 - protein, 11 aa, Homo sapiens
  Table 4 sequence identifier: Q9BQG0_C1031
  MOD_RES (5)..(5): May or may not be conjugated to a chemical probe
RHQACLLLQKT

SEQ ID NO: 9301 - protein, 11 aa, Homo sapiens
  Table 4 sequence identifier: O00170_C208
  MOD_RES (8)..(8): May or may not be conjugated to a chemical probe
KYYDAIACLKN

SEQ ID NO: 9302 - protein, 21 aa, Homo sapiens
  Table 4 sequence identifier: O60244_C729
  MOD_RES (12)..(12): May or may not be conjugated to a chemical probe
RTWVAELVFANCPLNGTSTRE

SEQ ID NO: 9303 - protein, 21 aa, Homo sapiens
  Table 4 sequence identifier: Q9NUB1_C422
  MOD_RES (12)..(12): May or may not be conjugated to a chemical probe
RTLGSVGEPINCEAWEWLHRV

SEQ ID NO: 9304 - protein, 22 aa, Homo sapiens
  Table 4 sequence identifier: O76074_C447
  MOD_RES (19)..(19): May or may not be conjugated to a chemical probe
KDKRFPWTTENTGNVNQQCIRS

SEQ ID NO: 9305 - protein, 18 aa, Homo sapiens
  Table 4 sequence identifier: Q96EY5_C231
  MOD_RES (3)..(3): May or may not be conjugated to a chemical probe
KSCSPLAFSAFGDLTIKS

SEQ ID NO: 9306 - protein, 15 aa, Homo sapiens
  Table 4 sequence identifier: Q9P2I0_C621
  MOD_RES (13)..(13): May or may not be conjugated to a chemical probe
RLKDSLVSSLQFCKA

SEQ ID NO: 9307 - protein, 13 aa, Homo sapiens
  Table 4 sequence identifier: Q9NQC7_C129
  MOD_RES (9)..(9): May or may not be conjugated to a chemical probe
KGLQIDVGCPVKV

SEQ ID NO: 9308 - protein, 20 aa, Homo sapiens
  Table 4 sequence identifier: P49903_C31
  MOD_RES (10)..(10): May or may not be conjugated to a chemical probe
RFTELKGTGCKVPQDVLQKL

SEQ ID NO: 9309 - protein, 18 aa, Homo sapiens
  Table 4 sequence identifier: P22102_C41
  MOD_RES (14)..(14): May or may not be conjugated to a chemical probe
KQVLVAPGNAGTACSEKI

SEQ ID NO: 9310 - protein, 16 aa, Homo sapiens
  Table 4 sequence identifier: Q13464_C1206
  MOD_RES (13)..(13): May or may not be conjugated to a chemical probe
KIFQILYANEGECRKD

SEQ ID NO: 9311 - protein, 12 aa, Homo sapiens
  Table 4 sequence identifier: Q01813_C112
  MOD_RES (6)..(6): May or may not be conjugated to a chemical probe
RLKAACNLLQRG

SEQ ID NO: 9312 - protein, 14 aa, Homo sapiens
  Table 4 sequence identifier: P16188_C188
  MOD_RES (8)..(8): May or may not be conjugated to a chemical probe
RAYLEGTCVEWLRR

SEQ ID NO: 9313 - protein, 14 aa, Homo sapiens
  Table 4 sequence identifier: P18463_C188
  MOD_RES (8)..(8): May or may not be conjugated to a chemical probe
RAYLEGTCVEWLRR

SEQ ID NO: 9314 - protein, 14 aa, Homo sapiens
  Table 4 sequence identifier: P30499_C188
  MOD_RES (8)..(8): May or may not be conjugated to a chemical probe
RAYLEGTCVEWLRR

SEQ ID NO: 9315 - protein, 14 aa, Homo sapiens
  Table 4 sequence identifier: P30492_C188
  MOD_RES (8)..(8): May or may not be conjugated to a chemical probe
RAYLEGTCVEWLRR

SEQ ID NO: 9316 - protein, 14 aa, Homo sapiens
  Table 4 sequence identifier: Q29940_C188
  MOD_RES (8)..(8): May or may not be conjugated to a chemical probe
RAYLEGTCVEWLRR

SEQ ID NO: 9317 - protein, 14 aa, Homo sapiens
  Table 4 sequence identifier: F8VZB9_C225
  MOD_RES (8)..(8): May or may not be conjugated to a chemical probe
RAYLEGTCVEWLRR

SEQ ID NO: 9318 - protein, 14 aa, Homo sapiens
  Table 4 sequence identifier: P10321_C188
  MOD_RES (8)..(8): May or may not be conjugated to a chemical probe
RAYLEGTCVEWLRR

SEQ ID NO: 9319 - protein, 21 aa, Homo sapiens
  Table 4 sequence identifier: Q96Q15_C3401
  MOD_RES (9)..(9): May or may not be conjugated to a chemical probe
KEQQIETVCETIQNLVDNIKT

SEQ ID NO: 9320 - protein, 11 aa, Homo sapiens
  Table 4 sequence identifier: P27635_C71
  MOD_RES (3)..(3): May or may not be conjugated to a chemical probe
RICANKYMVKS

SEQ ID NO: 9321 - protein, 24 aa, Homo sapiens
  Table 4 sequence identifier: P49756_C83
  MOD_RES (9)..(9): May or may not be conjugated to a chemical probe
KAKENDENCGPTTTVFVGNISEKA

SEQ ID NO: 9322 - protein, 11 aa, Homo sapiens
  Table 4 sequence identifier: Q8NE71_C758
  MOD_RES (9)..(9): May or may not be conjugated to a chemical probe
RVVFAELACRE

SEQ ID NO: 9323 - protein, 23 aa, Homo sapiens
  Table 4 sequence identifier: O95696_C441
  MOD_RES (7)..(7): May or may not be conjugated to a chemical probe
KALAEPCAVLPTVCAPYIPPQRL

SEQ ID NO: 9324 - protein, 12 aa, Homo sapiens
  Table 4 sequence identifier: Q9NXR7_C34
  MOD_RES (9)..(9): May or may not be conjugated to a chemical probe
KVGLDATNCLRI

SEQ ID NO: 9325 - protein, 18 aa, Homo sapiens
  Table 4 sequence identifier: O00478_C512
  MOD_RES (13)..(13): May or may not be conjugated to a chemical probe
RILTLEPTALTICPIPKE

SEQ ID NO: 9326 - protein, 13 aa, Homo sapiens
  Table 4 sequence identifier: O60942_C419
  MOD_RES (9)..(9): May or may not be conjugated to a chemical probe
RNKPFFDICTSRK

SEQ ID NO: 9327 - protein, 12 aa, Homo sapiens
  Table 4 sequence identifier: Q16831_C17
  MOD_RES (8)..(8): May or may not be conjugated to a chemical probe
KAESHNDCPVRL

SEQ ID NO: 9328 - protein, 12 aa, Homo sapiens
  Table 4 sequence identifier: Q14142_C20
  MOD_RES (8)..(8): May or may not be conjugated to a chemical probe
RSELVEGCGWRC

SEQ ID NO: 9329 - protein, 16 aa, Homo sapiens
  Table 4 sequence identifier: O75367_C276
  MOD_RES (6)..(6): May or may not be conjugated to a chemical probe
KFVIHCNSPVWGADKC

SEQ ID NO: 9330 - protein, 22 aa, Homo sapiens
  Table 4 sequence identifier: Q15052_C57
  MOD_RES (3)..(3): May or may not be conjugated to a chemical probe
KFCLDPQTEADCINNINDFLKG

SEQ ID NO: 9331 - protein, 14 aa, Homo sapiens
  Table 4 sequence identifier: P35626_C340
  MOD_RES (9)..(9): May or may not be conjugated to a chemical probe
RISDLGLACDFSKK

SEQ ID NO: 9332 - protein, 14 aa, Homo sapiens
  Table 4 sequence identifier: P25098_C340
  MOD_RES (9)..(9): May or may not be conjugated to a chemical probe
RISDLGLACDFSKK

SEQ ID NO: 9333 - protein, 21 aa, Homo sapiens
  Table 4 sequence identifier: P15428_C182
  MOD_RES (6)..(6): May or may not be conjugated to a chemical probe
RLNAICPGFVNTAILESIEKE

SEQ ID NO: 9334 - protein, 9 aa, Homo sapiens
  Table 4 sequence identifier: Q96FZ2_C131
  MOD_RES (2)..(2): May or may not be conjugated to a chemical probe
RCQGTNQRQ

SEQ ID NO: 9335 - protein, 21 aa, Homo sapiens
  Table 4 sequence identifier: Q9Y2H0_C736
  MOD_RES (6)..(6): May or may not be conjugated to a chemical probe
RSLPDCTPHPNSISIDAGPRQ

SEQ ID NO: 9336 - protein, 19 aa, Homo sapiens
  Table 4 sequence identifier: Q8TCU4_C2878
  MOD_RES (12)..(12): May or may not be conjugated to a chemical probe
KNVTITPDLPSCIFLEQRE

SEQ ID NO: 9337 - protein, 35 aa, Homo sapiens; identical to SEQ ID NO: 1841
  Table 4 sequence identifier: O95801_C238
  MOD_RES (7)..(7): May or may not be conjugated to a chemical probe

SEQ ID NO: 9338 - protein, 12 aa, Homo sapiens
  Table 4 sequence identifier: O95571_C219
  MOD_RES (6)..(6): May or may not be conjugated to a chemical probe
RLTLSCEEFVKI

SEQ ID NO: 9339 - protein, 27 aa, Homo sapiens
  Table 4 sequence identifier: Q9H4Z3_C29
  MOD_RES (20)..(20): May or may not be conjugated to a chemical probe
REEASLLSHSPGTSNQSQPCSPKPIRL

SEQ ID NO: 9340 - protein, 25 aa, Homo sapiens
  Table 4 sequence identifier: P55957_C15
  MOD_RES (4)..(4): May or may not be conjugated to a chemical probe
RDECITNLLVFGFLQSCSDNSFRRE

SEQ ID NO: 9341 - protein, 11 aa, Homo sapiens
  Table 4 sequence identifier: P49458_C39
  MOD_RES (8)..(8): May or may not be conjugated to a chemical probe
RHSDGNLCVKV

SEQ ID NO: 9342 - protein, 31 aa, Homo sapiens; identical to SEQ ID NO: 108
  Table 4 sequence identifier: Q9NQ88_C161
  MOD_RES (17)..(17): May or may not be conjugated to a chemical probe

SEQ ID NO: 9343 - protein, 17 aa, Homo sapiens
  Table 4 sequence identifier: P22234_C63
  MOD_RES (5)..(5): May or may not be conjugated to a chemical probe
KITSCIFQLLQEAGIKT

SEQ ID NO: 9344 - protein, 33 aa, Homo sapiens
  Table 4 sequence identifier: P35611_C253
  MOD_RES (2)..(2): May or may not be conjugated to a chemical probe
KCGLLPISPEALSLGEVAYHDYHGILVDEEEKV

SEQ ID NO: 9345 - protein, 21 aa, Homo sapiens
  Table 4 sequence identifier: P19474_C463
  MOD_RES (9)..(9): May or may not be conjugated to a chemical probe
KNTAPLTLCPLNIGSQGSTDY

SEQ ID NO: 9346 - protein, 20 aa, Homo sapiens
  Table 4 sequence identifier: Q12874_C103
  MOD_RES (7)..(7): May or may not be conjugated to a chemical probe
KHPNEICVPMSVEFEELLKA

SEQ ID NO: 9347 - protein, 18 aa, Homo sapiens
  Table 4 sequence identifier: Q03188_C612
  MOD_RES (2)..(2): May or may not be conjugated to a chemical probe
RCSLSEPLESDEADLAKK

SEQ ID NO: 9348 - protein, 16 aa, Homo sapiens
  Table 4 sequence identifier: P42166_C518
  MOD_RES (8)..(8): May or may not be conjugated to a chemical probe
RQLPSLACKYPVSSRE

SEQ ID NO: 9349 - protein, 20 aa, Homo sapiens
  Table 4 sequence identifier: Q9NY12_C80
  MOD_RES (12)..(12): May or may not be conjugated to a chemical probe
RVVLLGEFLHPCEDDIVCKC

SEQ ID NO: 9350 - protein, 10 aa, Homo sapiens
  Table 4 sequence identifier: Q10567_C241
  MOD_RES (7)..(7): May or may not be conjugated to a chemical probe
REAQSICERV

SEQ ID NO: 9351 - protein, 29 aa, Homo sapiens
  Table 4 sequence identifier: Q96F86_C499
  MOD_RES (27)..(27): May or may not be conjugated to a chemical probe
RIYLCDIGIPQQVFQEVGINYHSPFGCKF

SEQ ID NO: 9352 - protein, 25 aa, Homo sapiens
  Table 4 sequence identifier: Q86UV5_C986
  MOD_RES (7)..(7): May or may not be conjugated to a chemical probe
KILSDDCATLGTLGVIPESVILLKA

SEQ ID NO: 9353 - protein, 18 aa, Homo sapiens
  Table 4 sequence identifier: P49368_C213
  MOD_RES (14)..(14): May or may not be conjugated to a chemical probe
RVEKIPGGIIEDSCVLRG

SEQ ID NO: 9354 - protein, 33 aa, Homo sapiens; identical to SEQ ID NO: 3022
  Table 4 sequence identifier: P08559_C91
  MOD_RES (4)..(4): May or may not be conjugated to a chemical probe

SEQ ID NO: 9355 - protein, 9 aa, Homo sapiens
  Table 4 sequence identifier: Q96SZ5_C18
  MOD_RES (4)..(4): May or may not be conjugated to a chemical probe
RQACLTFRG

SEQ ID NO: 9356 - protein, 12 aa, Homo sapiens
  Table 4 sequence identifier: Q92974_C715
  MOD_RES (10)..(10): May or may not be conjugated to a chemical probe
RTFNGSIELCRA

SEQ ID NO: 9357 - protein, 17 aa, Homo sapiens
  Table 4 sequence identifier: Q92597_C289
  MOD_RES (5)..(5): May or may not be conjugated to a chemical probe
KMADCGGLPQISQPAKL

SEQ ID NO: 9358 - protein, 21 aa, Homo sapiens
  Table 4 sequence identifier: Q9BZF2_C466
  MOD_RES (2)..(2): May or may not be conjugated to a chemical probe
RCLPAASGPGADVSLWNILRN

SEQ ID NO: 9359 - protein, 28 aa, Homo sapiens
  Table 4 sequence identifier: Q9BQ69_C186
  MOD_RES (24)..(24): May or may not be conjugated to a chemical probe
KLEVDAIVNAANSSLLGGGGVDGCIHRA

SEQ ID NO: 9360 - protein, 12 aa, Homo sapiens
  Table 4 sequence identifier: Q14738_C17
  MOD_RES (2)..(2): May or may not be conjugated to a chemical probe
KCTAKPSSSGKD

SEQ ID NO: 9361 - protein, 10 aa, Homo sapiens
  Table 4 sequence identifier: P55210_C186
  MOD_RES (8)..(8): May or may not be conjugated to a chemical probe
KLFFIQACRG

SEQ ID NO: 9362 - protein, 28 aa, Homo sapiens
  Table 4 sequence identifier: P31939_C241
  MOD_RES (17)..(17): May or may not be conjugated to a chemical probe
KLPITVLNGAPGFINLCDALNAWQLVKE

SEQ ID NO: 9363 - protein, 18 aa, Homo sapiens
  Table 4 sequence identifier: O00329_C366
  MOD_RES (11)..(11): May or may not be conjugated to a chemical probe
KTVSSSEVSVCSEPVWKQ

SEQ ID NO: 9364 - protein, 18 aa, Homo sapiens
  Table 4 sequence identifier: Q9NZT2_C417
  MOD_RES (9)..(9): May or may not be conjugated to a chemical probe
KIALNLEGCALSQGSLRT

SEQ ID NO: 9365 - protein, 22 aa, Homo sapiens
  Table 4 sequence identifier: Q96I25_C302
  MOD_RES (18)..(18): May or may not be conjugated to a chemical probe
CPTKKKSDSNPLTEILKCPTKV

SEQ ID NO: 9366 - protein, 38 aa, Homo sapiens
  Table 4 sequence identifier: Q13158_C98
  MOD_RES (22)..(22): May or may not be conjugated to a chemical probe
RRVDDFEAGAAAGAAPGEEDLCAAFNVICDNVGKDWRR

SEQ ID NO: 9367 - protein, 21 aa, Homo sapiens
  Table 4 sequence identifier: P52948_C1312
  MOD_RES (5)..(5): May or may not be conjugated to a chemical probe
RWLSCTATPQIEEEVSLTQKN

SEQ ID NO: 9368 - protein, 22 aa, Homo sapiens
  Table 4 sequence identifier: Q7Z5K2_C964
  MOD_RES (15)..(15): May or may not be conjugated to a chemical probe
KTGEQDGLIGTALNCVLQVPKY

SEQ ID NO: 9369 - protein, 15 aa, Homo sapiens
  Table 4 sequence identifier: Q8NI37_C57
  MOD_RES (4)..(4): May or may not be conjugated to a chemical probe
KGACYGDDACFVARH

SEQ ID NO: 9370 - protein, 15 aa, Homo sapiens
  Table 4 sequence identifier: Q9Y6Y8_C604
  MOD_RES (2)..(2): May or may not be conjugated to a chemical probe
KCPGPLAVANGVVKQ

SEQ ID NO: 9371 - protein, 11 aa, Homo sapiens
  Table 4 sequence identifier: Q969E8_C114
  MOD_RES (6)..(6): May or may not be conjugated to a chemical probe
REMASCITQRK

SEQ ID NO: 9372 - protein, 27 aa, Homo sapiens
  Table 4 sequence identifier: Q9UEW8_C82
  MOD_RES (23)..(23): May or may not be conjugated to a chemical probe
RDAYELQEVIGSGATAVVQAALCKPRQ

SEQ ID NO: 9373 - protein, 11 aa, Homo sapiens
  Table 4 sequence identifier: Q9P032_C87
  MOD_RES (6)..(6): May or may not be conjugated to a chemical probe
KAAETCQEPKE

SEQ ID NO: 9374 - protein, 26 aa, Homo sapiens
  Table 4 sequence identifier: Q7L2J0_C244
  MOD_RES (12)..(12): May or may not be conjugated to a chemical probe
KDITDPLSLNTCTDEGHVVLASPLKT

SEQ ID NO: 9375 - protein, 19 aa, Homo sapiens
  Table 4 sequence identifier: Q70CQ2_C741
  MOD_RES (17)..(17): May or may not be conjugated to a chemical probe
RTGDFLGETIGNELFNCRQ

SEQ ID NO: 9376 - protein, 38 aa, Homo sapiens
  Table 4 sequence identifier: Q08378_C1403
  MOD_RES (18)..(18): May or may not be conjugated to a chemical probe
KGEASSSNPATPIKIPDCPVPASLLEELLRPPPAVSKE

SEQ ID NO: 9377 - protein, 22 aa, Homo sapiens
  Table 4 sequence identifier: Q14C86_C741
  MOD_RES (8)..(8): May or may not be conjugated to a chemical probe
RLQELESCSGLGSTSDDTDVRE

SEQ ID NO: 9378 - protein, 10 aa, Homo sapiens
  Table 4 sequence identifier: O00267_C626
  MOD_RES (8)..(8): May or may not be conjugated to a chemical probe
RSFAFLHCKK

SEQ ID NO: 9379 - protein, 15 aa, Homo sapiens
  Table 4 sequence identifier: P51159_C188
  MOD_RES (2)..(2): May or may not be conjugated to a chemical probe
RCVDKSWIPEGVVRS

SEQ ID NO: 9380 - protein, 16 aa, Homo sapiens
  Table 4 sequence identifier: Q9NZ63_C145
  MOD_RES (6)..(6): May or may not be conjugated to a chemical probe
KNAEDCLYELPENIRV

SEQ ID NO: 9381 - protein, 24 aa, Homo sapiens
  Table 4 sequence identifier: P15374_C95
  MOD_RES (8)..(8): May or may not be conjugated to a chemical probe
KQTISNACGTIGLIHAIANNKDKM

SEQ ID NO: 9382 - protein, 16 aa, Homo sapiens
  Table 4 sequence identifier: Q9H9A5_C633
  MOD_RES (6)..(6): May or may not be conjugated to a chemical probe
KRAPQCYPSSVNSART

SEQ ID NO: 9383 - protein, 20 aa, Homo sapiens
  Table 4 sequence identifier: Q99614_C28
  MOD_RES (10)..(10): May or may not be conjugated to a chemical probe
KVTDTQEAECAGPPVPDPKN

SEQ ID NO: 9384 - protein, 22 aa, Homo sapiens
  Table 4 sequence identifier: Q8ND71_C75
  MOD_RES (17)..(17): May or may not be conjugated to a chemical probe
RKVVVIDTPDLFSSIACAEDKQ

SEQ ID NO: 9385 - protein, 17 aa, Homo sapiens
  Table 4 sequence identifier: P11171_C224
  MOD_RES (12)..(12): May or may not be conjugated to a chemical probe
KVSLLDDTVYECVVEKH

SEQ ID NO: 9386 - protein, 44 aa, Homo sapiens
  Table 4 sequence identifier: Q9H400_C138
  MOD_RES (12)..(12): May or may not be conjugated to a chemical probe
RALPAAAATAGCAGLEATYSNVGLAALPGVSLAASPVVAEYARV

SEQ ID NO: 9387 - protein, 28 aa, Homo sapiens
  Table 4 sequence identifier: Q9BVC5_C10
  MOD_RES (3)..(3): May or may not be conjugated to a chemical probe
RSCTDSELLLHPELLSQEFLLLTLEQKN

SEQ ID NO: 9388 - protein, 21 aa, Homo sapiens
  Table 4 sequence identifier: Q15007_C270
  MOD_RES (18)..(18): May or may not be conjugated to a chemical probe
RTTASEPVEQSEATSKDCSRL

SEQ ID NO: 9389 - protein, 31 aa, Homo sapiens
  Table 4 sequence identifier: P17987_C76
  MOD_RES (4)..(4): May or may not be conjugated to a chemical probe
KVLCELADLQDKEVGDGTTSVVIIAAELLKN

SEQ ID NO: 9390 - protein, 12 aa, Homo sapiens
  Table 4 sequence identifier: H7BZ11_C99
  MOD_RES (2)..(2): May or may not be conjugated to a chemical probe
RCKHFELGGDKK

SEQ ID NO: 9391 - protein, 12 aa, Homo sapiens
  Table 4 sequence identifier: Q969Q0_C88
  MOD_RES (2)..(2): May or may not be conjugated to a chemical probe
RCKHFELGGDKK

SEQ ID NO: 9392 - protein, 19 aa, Homo sapiens
  Table 4 sequence identifier: Q9NS86_C187
  MOD_RES (5)..(5): May or may not be conjugated to a chemical probe
RSVVCQESDLPDELLYGRA

SEQ ID NO: 9393 - protein, 29 aa, Homo sapiens
  Table 4 sequence identifier: Q9H7N4_C675
  MOD_RES (22)..(22): May or may not be conjugated to a chemical probe
RSGDGSEKAPAPAPPPSGSTSCGDRDSRR

SEQ ID NO: 9394 - protein, 19 aa, Homo sapiens
  Table 4 sequence identifier: Q9Y3S1_C326
  MOD_RES (5)..(5): May or may not be conjugated to a chemical probe
RDLKCDNIFITGPTGSVKI

SEQ ID NO: 9395 - protein, 16 aa, Homo sapiens
  Table 4 sequence identifier: Q9BYP7_C278
  MOD_RES (2)..(2): May or may not be conjugated to a chemical probe
KCDNIFITGPTGSVKI

SEQ ID NO: 9396 - protein, 16 aa, Homo sapiens
  Table 4 sequence identifier: Q9H4A3_C352
  MOD_RES (2)..(2): May or may not be conjugated to a chemical probe
KCDNIFITGPTGSVKI

SEQ ID NO: 9397 - protein, 42 aa, Homo sapiens; identical to SEQ ID NO: 5547
  Table 4 sequence identifier: Q8IYL3_C124
  MOD_RES (40)..(40): May or may not be conjugated to a chemical probe

SEQ ID NO: 9398 - protein, 16 aa, Homo sapiens
  Table 4 sequence identifier: Q86YS7_C449
  MOD_RES (11)..(11): May or may not be conjugated to a chemical probe
RFLQDGTVEGCLEQRL

SEQ ID NO: 9399 - protein, 15 aa, Homo sapiens
  Table 4 sequence identifier: Q86UW7_C1052
  MOD_RES (11)..(11): May or may not be conjugated to a chemical probe
KLMASDMLEACVKRT

SEQ ID NO: 9400 - protein, 23 aa, Homo sapiens
  Table 4 sequence identifier: Q9UBS0_C348
  MOD_RES (9)..(9): May or may not be conjugated to a chemical probe
RVDPPFRPCLQSEEDVSQFDTRF

SEQ ID NO: 9401 - protein, 29 aa, Homo sapiens
  Table 4 sequence identifier: O60232_C152
  MOD_RES (20)..(20): May or may not be conjugated to a chemical probe
KAAQGPPAPAVPPNTDVMACTQTALLQKL

SEQ ID NO: 9402 - protein, 15 aa, Homo sapiens
  Table 4 sequence identifier: Q9NZT2_C87
  MOD_RES (3)..(3): May or may not be conjugated to a chemical probe
RDCNGDTPNLSFYRN

SEQ ID NO: 9403 - protein, 22 aa, Homo sapiens
  Table 4 sequence identifier: Q8N3D4_C1364
  MOD_RES (10)..(10): May or may not be conjugated to a chemical probe
RFQDTSQYVCAELQALEQEQRQ

SEQ ID NO: 9404 - protein, 34 aa, Homo sapiens; identical to SEQ ID NO: 2670
  Table 4 sequence identifier: Q14980_C1729
  MOD_RES (22)..(22): May or may not be conjugated to a chemical probe

SEQ ID NO: 9405 - protein, 20 aa, Homo sapiens
  Table 4 sequence identifier: Q15365_C118
  MOD_RES (18)..(18): May or may not be conjugated to a chemical probe
RLVVPATQCGSLIGKGGCKI

SEQ ID NO: 9406 - protein, 21 aa, Homo sapiens
  Table 4 sequence identifier: Q9UP83_C64
  MOD_RES (8)..(8): May or may not be conjugated to a chemical probe
RELLQDGCYSDFLNEDFDVKT

SEQ ID NO: 9407 - protein, 11 aa, Homo sapiens
  Table 4 sequence identifier: Q5RKV6_C117
  MOD_RES (7)..(7): May or may not be conjugated to a chemical probe
RAPPGGCEERE

SEQ ID NO: 9408 - protein, 15 aa, Homo sapiens
  Table 4 sequence identifier: Q96T23_C1436
  MOD_RES (10)..(10): May or may not be conjugated to a chemical probe
RVTDLVDYVCNSEQL

SEQ ID NO: 9409 - protein, 20 aa, Homo sapiens
  Table 4 sequence identifier: P13727_C147
  MOD_RES (4)..(4): May or may not be conjugated to a chemical probe
RIQCSVSALNQGQVWIGGRI

SEQ ID NO: 9410 - protein, 11 aa, Homo sapiens
  Table 4 sequence identifier: Q6NYC8_C276
  MOD_RES (8)..(8): May or may not be conjugated to a chemical probe
RQDYSEECGRK

SEQ ID NO: 9411 - protein, 28 aa, Homo sapiens
  Table 4 sequence identifier: O60282_C393
  MOD_RES (6)..(6): May or may not be conjugated to a chemical probe
KNLEPCDNTPIIDNIAPVVAGISTEEKE

SEQ ID NO: 9412 - protein, 13 aa, Homo sapiens
  Table 4 sequence identifier: Q92616_C2015
  MOD_RES (5)..(5): May or may not be conjugated to a chemical probe
RKALCDPLEEVRE

SEQ ID NO: 9413 - protein, 13 aa, Homo sapiens
  Table 4 sequence identifier: O75808_C101
  MOD_RES (4)..(4): May or may not be conjugated to a chemical probe
KGSCQEEAGPVRT

SEQ ID NO: 9414 - protein, 22 aa, Homo sapiens
  Table 4 sequence identifier: Q9UQ35_C1029
  MOD_RES (10)..(10): May or may not be conjugated to a chemical probe
KSKDSLVQSCPGSLSLCAGVKS

SEQ ID NO: 9415 - protein, 26 aa, Homo sapiens
  Table 4 sequence identifier: Q8IZ73_C246
  MOD_RES (23)..(23): May or may not be conjugated to a chemical probe
RLLAENEDVVVVDKPSSIPVHPCGRF

SEQ ID NO: 9416 - protein, 25 aa, Homo sapiens
  Table 4 sequence identifier: Q92985_C394
  MOD_RES (20)..(20): May or may not be conjugated to a chemical probe
KVYWEVGGPPGSASPSTPACLLPRN

SEQ ID NO: 9417 - protein, 23 aa, Homo sapiens
  Table 4 sequence identifier: P10914_C274
  MOD_RES (21)..(21): May or may not be conjugated to a chemical probe
KGYLLNEPGVQPTSVYGDFSCKE

SEQ ID NO: 9418 - protein, 17 aa, Homo sapiens
  Table 4 sequence identifier: P50395_C202
  MOD_RES (10)..(10): May or may not be conjugated to a chemical probe
RTDDYLDQPCYETINRI

SEQ ID NO: 9419 - protein, 11 aa, Homo sapiens
  Table 4 sequence identifier: Q9UK61_C690
  MOD_RES (9)..(9): May or may not be conjugated to a chemical probe
KELINLIQCRK

SEQ ID NO: 9420 - protein, 27 aa, Homo sapiens
  Table 4 sequence identifier: Q9UPN7_C612
  MOD_RES (24)..(24): May or may not be conjugated to a chemical probe
KTANITFSLNADDENPNANLLEICYKD

SEQ ID NO: 9421 - protein, 14 aa, Homo sapiens
  Table 4 sequence identifier: P07996_C813
  MOD_RES (4)..(4): May or may not be conjugated to a chemical probe
RDNCQYVYNVDQRD

SEQ ID NO: 9422 - protein, 29 aa, Homo sapiens
  Table 4 sequence identifier: Q96GW9_C428
  MOD_RES (15)..(15): May or may not be conjugated to a chemical probe
RINPSETYPAFCTTCFPSEPGLVGPSVRA

SEQ ID NO: 9423 - protein, 26 aa, Homo sapiens
  Table 4 sequence identifier: O14920_C716
  MOD_RES (13)..(13): May or may not be conjugated to a chemical probe
KSEELVAEAHNLCTLLENAIQDTVRE

SEQ ID NO: 9424 - protein, 24 aa, Homo sapiens
  Table 4 sequence identifier: Q7Z6I6_C20
  MOD_RES (5)..(5): May or may not be conjugated to a chemical probe
RVFGCDLQEHLQHSGQEVPQVLKS

SEQ ID NO: 9425 - protein, 15 aa, Homo sapiens
  Table 4 sequence identifier: Q9NYV4_C1009
  MOD_RES (2)..(2): May or may not be conjugated to a chemical probe
RCTAEQTLQSDFLKD

SEQ ID NO: 9426 - protein, 13 aa, Homo sapiens
  Table 4 sequence identifier: Q9UG63_C388
  MOD_RES (10)..(10): May or may not be conjugated to a chemical probe
KTLSFYFPPCGKI

SEQ ID NO: 9427 - protein, 15 aa, Homo sapiens
  Table 4 sequence identifier: Q96AE4_C332
  MOD_RES (2)..(2): May or may not be conjugated to a chemical probe
RCQHAAEIITDLLRS

SEQ ID NO: 9428 - protein, 23 aa, Homo sapiens
  Table 4 sequence identifier: Q8N3P4_C1371
  MOD_RES (21)..(21): May or may not be conjugated to a chemical probe
KKGTSEPVLDPQQIQAFDQLCRL

SEQ ID NO: 9429 - protein, 13 aa, Homo sapiens
  Table 4 sequence identifier: O15541_C15
  MOD_RES (7)..(7): May or may not be conjugated to a chemical probe
KAVDQVCTFLFKK

SEQ ID NO: 9430 - protein, 24 aa, Homo sapiens
  Table 4 sequence identifier: Q9UBN7_C426
  MOD_RES (9)..(9): May or may not be conjugated to a chemical probe
RSAQASVSCALEALEPFWEVLVRS

SEQ ID NO: 9431 - protein, 29 aa, Homo sapiens
  Table 4 sequence identifier: P41252_C526
  MOD_RES (8)..(8): May or may not be conjugated to a chemical probe
RISEVFDCWFESGSMPYAQVHYPFENKRE

SEQ ID NO: 9432 - protein, 23 aa, Homo sapiens
  Table 4 sequence identifier: O60306_C28
  MOD_RES (21)..(21): May or may not be conjugated to a chemical probe
KKIVAPTVSQINAEFVTQLACKY

SEQ ID NO: 9433 - protein, 8 aa, Homo sapiens
  Table 4 sequence identifier: Q8NFW8_C432
  MOD_RES (6)..(6): May or may not be conjugated to a chemical probe
KVNNSCQK

SEQ ID NO: 9434 - protein, 17 aa, Homo sapiens
  Table 4 sequence identifier: Q9UHB4_C486
  MOD_RES (15)..(15): May or may not be conjugated to a chemical probe
RVAQGQTGNFLFFGCRW

SEQ ID NO: 9435 - protein, 26 aa, Homo sapiens
  Table 4 sequence identifier: Q5TGY3_C1540
  MOD_RES (12)..(12): May or may not be conjugated to a chemical probe
RGPAAAAAGYGCPLLSDLTLSPVPRD

SEQ ID NO: 9436 - protein, 19 aa, Homo sapiens
  Table 4 sequence identifier: Q8IW35_C484
  MOD_RES (7)..(7): May or may not be conjugated to a chemical probe
KAGLLPCPEPTIISAILKD

SEQ ID NO: 9437 - protein, 33 aa, Homo sapiens; identical to SEQ ID NO: 1876
  Table 4 sequence identifier: Q8WUA4_C212
  MOD_RES (27)..(27): May or may not be conjugated to a chemical probe

SEQ ID NO: 9438 - protein, 36 aa, Homo sapiens
  Table 4 sequence identifier: Q6UUV7_C541
  MOD_RES (17)..(17): May or may not be conjugated to a chemical probe
RELQDSFHLRPSPYSNCGSLPNTILPEDSSTSLFKD

SEQ ID NO: 9439 - protein, 54 aa, Homo sapiens
  Table 4 sequence identifier: Q5T4S7_C2449
  MOD_RES (25)..(25): May or may not be conjugated to a chemical probe
KTKEQFGWPDEPPEEFPSASVSNICPSNLNQSNGTGDSDSAAPTTTSGTVLERL

SEQ ID NO: 9440 - protein, 38 aa, Homo sapiens; identical to SEQ ID NO: 74
  Table 4 sequence identifier: Q13155_C291
  MOD_RES (27)..(27): May or may not be conjugated to a chemical probe

SEQ ID NO: 9441 - protein, 19 aa, Homo sapiens
  Table 4 sequence identifier: Q8TEU7_C1561
  MOD_RES (14)..(14): May or may not be conjugated to a chemical probe
RLPPASLSSNLVACVPSKI

SEQ ID NO: 9442 - protein, 15 aa, Homo sapiens
  Table 4 sequence identifier: P49792_C1196
  MOD_RES (12)..(12): May or may not be conjugated to a chemical probe
KTGEEDEEEFFCNRA

SEQ ID NO: 9443 - protein, 11 aa, Homo sapiens
  Table 4 sequence identifier: O14617_C574
  MOD_RES (4)..(4): May or may not be conjugated to a chemical probe
RASCILQLVKH

SEQ ID NO: 9444 - protein, 44 aa, Homo sapiens
  Table 4 sequence identifier: Q6P2E9_C54
  MOD_RES (34)..(34): May or may not be conjugated to a chemical probe
KLDRPAGGPSAESPRPSSAYNGDLNGLLVPDPLCSGDSTSANKT

SEQ ID NO: 9445 - protein, 38 aa, Homo sapiens
  Table 4 sequence identifier: Q5VZ89_C975
  MOD_RES (18)..(18): May or may not be conjugated to a chemical probe
REDVETGLDPLSLLATECTGGKTPDSEDKLFSPVIARN

SEQ ID NO: 9446 - protein, 13 aa, Homo sapiens
  Table 4 sequence identifier: P57772_C406
  MOD_RES (10)..(10): May or may not be conjugated to a chemical probe
KAGQATEGHCPRQ

SEQ ID NO: 9447 - protein, 24 aa, Homo sapiens
  Table 4 sequence identifier: P30041_C91
  MOD_RES (8)..(8): May or may not be conjugated to a chemical probe
KDINAYNCEEPTEKLPFPIIDDRN

SEQ ID NO: 9448 - protein, 17 aa, Homo sapiens
  Table 4 sequence identifier: Q9H2G2_C1212
  MOD_RES (8)..(8): May or may not be conjugated to a chemical probe
KMTGESECLNPSTQSRI

SEQ ID NO: 9449 - protein, 25 aa, Homo sapiens
  Table 4 sequence identifier: Q16891_C603
  MOD_RES (4)..(4): May or may not be conjugated to a chemical probe
KANCSDNEFTQALTAAIPPESLTRG

SEQ ID NO: 9450 - protein, 9 aa, Homo sapiens
  Table 4 sequence identifier: P55201_C570
  MOD_RES (3)..(3): May or may not be conjugated to a chemical probe
RNCDQVGRD

SEQ ID NO: 9451 - protein, 25 aa, Homo sapiens
  Table 4 sequence identifier: P09543_C49
  MOD_RES (23)..(23): May or may not be conjugated to a chemical probe
KDKPELQFPFLQDEDTVATLLECKT

SEQ ID NO: 9452 - protein, 19 aa, Homo sapiens
  Table 4 sequence identifier: P53701_C178
  MOD_RES (12)..(12): May or may not be conjugated to a chemical probe
KWEALHAAECPCGPSLIRF

SEQ ID NO: 9453 - protein, 20 aa, Homo sapiens
  Table 4 sequence identifier: O75376_C2056
  MOD_RES (10)..(10): May or may not be conjugated to a chemical probe
RLITLADHICQIITQDFARN

SEQ ID NO: 9454 - protein, 14 aa, Homo sapiens
  Table 4 sequence identifier: O60610_C164
  MOD_RES (8)..(8): May or may not be conjugated to a chemical probe
RDMPLLSCLESLRV

SEQ ID NO: 9455 - protein, 21 aa, Homo sapiens
  Table 4 sequence identifier: Q9ULL5_C112
  MOD_RES (9)..(9): May or may not be conjugated to a chemical probe
RFVPLTSICFPDSLLQDEERS

SEQ ID NO: 9456 - protein, 30 aa, Homo sapiens; identical to SEQ ID NO: 3267
  Table 4 sequence identifier: Q9UMS4_C230
  MOD_RES (23)..(23): May or may not be conjugated to a chemical probe

SEQ ID NO: 9457 - protein, 27 aa, Homo sapiens
  Table 4 sequence identifier: Q99576_C112
  MOD_RES (5)..(5): May or may not be conjugated to a chemical probe
KFQSCLSPEEPAPESPQVPEAPGGSAV

SEQ ID NO: 9458 - protein, 20 aa, Homo sapiens
  Table 4 sequence identifier: Q9UFW8_C167
  MOD_RES (20)..(20): May or may not be conjugated to a chemical probe
RAYLPDGYENENQLLNSQDC

SEQ ID NO: 9459 - protein, 21 aa, Homo sapiens
  Table 4 sequence identifier: P62873_C25
  MOD_RES (3)..(3): May or may not be conjugated to a chemical probe
KACADATLSQITNNIDPVGRI

SEQ ID NO: 9460 - protein, 24 aa, Homo sapiens
  Table 4 sequence identifier: P04049_C27
  MOD_RES (10)..(10): May or may not be conjugated to a chemical probe
KDAVFDGSSCISPTIVQQFGYQRR

SEQ ID NO: 9461 - protein, 17 aa, Homo sapiens
  Table 4 sequence identifier: Q9Y6A5_C426
  MOD_RES (4)..(4): May or may not be conjugated to a chemical probe
KSGCSEAQPPESPETRL

SEQ ID NO: 9462 - protein, 34 aa, Homo sapiens; identical to SEQ ID NO: 2570
  Table 4 sequence identifier: Q9Y6A5_C502
  MOD_RES (14)..(14): May or may not be conjugated to a chemical probe

SEQ ID NO: 9463 - protein, 10 aa, Homo sapiens
  Table 4 sequence identifier: Q9H6K4_C164
  MOD_RES (5)..(5): May or may not be conjugated to a chemical probe
RAQLCNPGRS

SEQ ID NO: 9464 - protein, 10 aa, Homo sapiens
  Table 4 sequence identifier: P25205_C360
  MOD_RES (5)..(5): May or may not be conjugated to a chemical probe
RYVLCTAPRA

SEQ ID NO: 9465 - protein, 18 aa, Homo sapiens
  Table 4 sequence identifier: Q9UMS0_C213
  MOD_RES (9)..(9): May or may not be conjugated to a chemical probe
KLQGSCTSCPSSIITLKN

SEQ ID NO: 9466 - protein, 14 aa, Homo sapiens
  Table 4 sequence identifier: Q08881_C143
  MOD_RES (6)..(6): May or may not be conjugated to a chemical probe
KLATGCAQYDPTKN

SEQ ID NO: 9467 - protein, 33 aa, Homo sapiens; identical to SEQ ID NO: 1263
  Table 4 sequence identifier: Q14974_C455
  MOD_RES (22)..(22): May or may not be conjugated to a chemical probe

SEQ ID NO: 9468 - protein, 33 aa, Homo sapiens; identical to SEQ ID NO: 1537
  Table 4 sequence identifier: Q8WVJ2_C14
  MOD_RES (7)..(7): May or may not be conjugated to a chemical probe

SEQ ID NO: 9469 - protein, 24 aa, Homo sapiens
  Table 4 sequence identifier: O00139_C525
  MOD_RES (3)..(3): May or may not be conjugated to a chemical probe
RTCMIATISPGMASCENTLNTLRY

SEQ ID NO: 9470 - protein, 15 aa, Homo sapiens
  Table 4 sequence identifier: Q96T51_C184
  MOD_RES (3)..(3): May or may not be conjugated to a chemical probe
KLCPEASDIATSVRN

SEQ ID NO: 9471 - protein, 34 aa, Homo sapiens
  Table 4 sequence identifier: P08575_C1178
  MOD_RES (11)..(11): May or may not be conjugated to a chemical probe
RDGSQQTGIFCALLNLLESAETEEVVDIFQVVKA

SEQ ID NO: 9472 - protein, 22 aa, Homo sapiens
  Table 4 sequence identifier: P30626_C75
  MOD_RES (20)..(20): May or may not be conjugated to a chemical probe
RCLTQSGIAGGYKPFNLETCRL

SEQ ID NO: 9473 - protein, 12 aa, Homo sapiens
  Table 4 sequence identifier: P63010_C95
  MOD_RES (3)..(3): May or may not be conjugated to a chemical probe
KDCEDPNPLIRA

SEQ ID NO: 9474 - protein, 11 aa, Homo sapiens
  Table 4 sequence identifier: F5H5P2_C231
  MOD_RES (9)..(9): May or may not be conjugated to a chemical probe
RQMPVHYGCKE

SEQ ID NO: 9475 - protein, 11 aa, Homo sapiens
  Table 4 sequence identifier: P12694_C197
  MOD_RES (9)..(9): May or may not be conjugated to a chemical probe
RQMPVHYGCKE

SEQ ID NO: 9476 - protein, 21 aa, Homo sapiens
  Table 4 sequence identifier: Q14C86_C1129
  MOD_RES (5)..(5): May or may not be conjugated to a chemical probe
RLALCSADSVAFPVLTHSTRN

SEQ ID NO: 9477 - protein, 17 aa, Homo sapiens
  Table 4 sequence identifier: A6NKT7_C349
  MOD_RES (14)..(14): May or may not be conjugated to a chemical probe
KGEAGQNLLEMMACDRL

SEQ ID NO: 9478 - protein, 18 aa, Homo sapiens
  Table 4 sequence identifier: Q9Y3L3_C56
  MOD_RES (5)..(5): May or may not be conjugated to a chemical probe
RLQACLQGQSGADMDKRV

SEQ ID NO: 9479 - protein, 13 aa, Homo sapiens
  Table 4 sequence identifier: Q8IXH7_C293
  MOD_RES (3)..(3): May or may not be conjugated to a chemical probe
RACQALGAMLSKG

SEQ ID NO: 9480 - protein, 31 aa, Homo sapiens; identical to SEQ ID NO: 4133
  Table 4 sequence identifier: Q53ET0_C675
  MOD_RES (17)..(17): May or may not be conjugated to a chemical probe

SEQ ID NO: 9481 - protein, 27 aa, Homo sapiens
  Table 4 sequence identifier: Q9BZH6_C363
  MOD_RES (10)..(10): May or may not be conjugated to a chemical probe
KTVRPFSMVCCPVNENAAALVVSDGRV

SEQ ID NO: 9482 - protein, 27 aa, Homo sapiens
  Table 4 sequence identifier: Q9BZH6_C364
  MOD_RES (11)..(11): May or may not be conjugated to a chemical probe
KTVRPFSMVCCPVNENAAALVVSDGRV

SEQ ID NO: 9483 - protein, 25 aa, Homo sapiens
  Table 4 sequence identifier: O95466_C733
  MOD_RES (3)..(3): May or may not be conjugated to a chemical probe
RICQAIEAYDLQALGLDFLELLMRF

SEQ ID NO: 9484 - protein, 8 aa, Homo sapiens
  Table 4 sequence identifier: P30876_C1155
  MOD_RES (6)..(6): May or may not be conjugated to a chemical probe
RMPYACKL

SEQ ID NO: 9485 - protein, 49 aa, Homo sapiens; identical to SEQ ID NO: 2595
  Table 4 sequence identifier: P57764_C457
  MOD_RES (40)..(40): May or may not be conjugated to a chemical probe

SEQ ID NO: 9486 - protein, 9 aa, Homo sapiens
  Table 4 sequence identifier: P40925_C251
  MOD_RES (4)..(4): May or may not be conjugated to a chemical probe
KAICDHVRD

SEQ ID NO: 9487 - protein, 23 aa, Homo sapiens
  Table 4 sequence identifier: Q29RF7_C1116
  MOD_RES (11)..(11): May or may not be conjugated to a chemical probe
KFFTQPEKDFCNDKSYISEETRV

SEQ ID NO: 9488 - protein, 18 aa, Homo sapiens
  Table 4 sequence identifier: P15498_C845
  MOD_RES (18)..(18): May or may not be conjugated to a chemical probe
RVGWFPANYVEEDYSEYC

SEQ ID NO: 9489 - protein, 30 aa, Homo sapiens; identical to SEQ ID NO: 2728
  Table 4 sequence identifier: Q8N163_C443
  MOD_RES (26)..(26): May or may not be conjugated to a chemical probe

SEQ ID NO: 9490 - protein, 9 aa, Homo sapiens
  Table 4 sequence identifier: Q32P44_C307
  MOD_RES (6)..(6): May or may not be conjugated to a chemical probe
RGHTDCVRC

SEQ ID NO: 9491 - protein, 9 aa, Homo sapiens
  Table 4 sequence identifier: Q8WZ74_C759
  MOD_RES (6)..(6): May or may not be conjugated to a chemical probe
RGHTDCVRC

SEQ ID NO: 9492 - protein, 9 aa, Homo sapiens
  Table 4 sequence identifier: O60264_C165
  MOD_RES (6)..(6): May or may not be conjugated to a chemical probe
KATNVCTRF

SEQ ID NO: 9493 - protein, 10 aa, Homo sapiens
  Table 4 sequence identifier: Q9BY77_C338
  MOD_RES (2)..(2): May or may not be conjugated to a chemical probe
RCLDGQPMKC

SEQ ID NO: 9494 - protein, 12 aa, Homo sapiens
  Table 4 sequence identifier: P81877_C82
  MOD_RES (4)..(4): May or may not be conjugated to a chemical probe
RETCEHSSEAKA

SEQ ID NO: 9495 - protein, 9 aa, Homo sapiens
  Table 4 sequence identifier: O43396_C34
  MOD_RES (3)..(3): May or may not be conjugated to a chemical probe
RGCGPCLRI

SEQ ID NO: 9496 - protein, 10 aa, Homo sapiens
  Table 4 sequence identifier: Q7Z6Z7_C1879
  MOD_RES (8)..(8): May or may not be conjugated to a chemical probe
RVLGPAACRN

SEQ ID NO: 9497 - protein, 13 aa, Homo sapiens
  Table 4 sequence identifier: Q5VT06_C2716
  MOD_RES (3)..(3): May or may not be conjugated to a chemical probe
KLCTPLLDLLTRE

SEQ ID NO: 9498 - protein, 14 aa, Homo sapiens
  Table 4 sequence identifier: O95466_C939
  MOD_RES (9)..(9): May or may not be conjugated to a chemical probe
REFVRQDDCMVLKE

SEQ ID NO: 9499 - protein, 10 aa, Homo sapiens
  Table 4 sequence identifier: Q13045_C576
  MOD_RES (8)..(8): May or may not be conjugated to a chemical probe
RNYLGAECRT

SEQ ID NO: 9500 - protein, 15 aa, Homo sapiens
  Table 4 sequence identifier: Q8WUW1_C43
  MOD_RES (13)..(13): May or may not be conjugated to a chemical probe
KIADFLNSFDMSCRS

SEQ ID NO: 9501 - protein, 19 aa, Homo sapiens
  Table 4 sequence identifier: Q86UP2_C303
  MOD_RES (12)..(12): May or may not be conjugated to a chemical probe
KTMMFSEDEALCVVDLLKE

SEQ ID NO: 9502 - protein, 22 aa, Homo sapiens
  Table 4 sequence identifier: Q9BSQ5_C437
  MOD_RES (15)..(15): May or may not be conjugated to a chemical probe
RMISDISSDIEALGCSMDQDSA

SEQ ID NO: 9503 - protein, 23 aa, Homo sapiens
  Table 4 sequence identifier: O43149_C212
  MOD_RES (19)..(19): May or may not be conjugated to a chemical probe
RLSSAVMPYPMLEHCNNMCTMRS

SEQ ID NO: 9504 - protein, 11 aa, Homo sapiens
  Table 4 sequence identifier: P19338_C543
  MOD_RES (7)..(7): May or may not be conjugated to a chemical probe
KEALNSCNKRE

SEQ ID NO: 9505 - protein, 30 aa, Homo sapiens; identical to SEQ ID NO: 7549
  Table 4 sequence identifier: P10599_C35
  MOD_RES (28)..(28): May or may not be conjugated to a chemical probe

SEQ ID NO: 9506 - protein, 33 aa, Homo sapiens; identical to SEQ ID NO: 232
  Table 4 sequence identifier: Q9UNI6_C265
  MOD_RES (5)..(5): May or may not be conjugated to a chemical probe

SEQ ID NO: 9507 - protein, 21 aa, Homo sapiens
  Table 4 sequence identifier: O43143_C774
  MOD_RES (17)..(17): May or may not be conjugated to a chemical probe
RNKIAPQYYDMSNFPQCEAKR

SEQ ID NO: 9508 - protein, 12 aa, Homo sapiens
  Table 4 sequence identifier: P25205_C148
  MOD_RES (6)..(6): May or may not be conjugated to a chemical probe
RSVHYCPATKKT

SEQ ID NO: 9509 - protein, 14 aa, Homo sapiens
  Table 4 sequence identifier: P48553_C1130
  MOD_RES (3)..(3): May or may not be conjugated to a chemical probe
KSCGVISMPVAARA

SEQ ID NO: 9510 - protein, 19 aa, Homo sapiens
  Table 4 sequence identifier: Q86XR8_C497
  MOD_RES (16)..(16): May or may not be conjugated to a chemical probe
KDMQSIQNSLQSSSLCWDY

SEQ ID NO: 9511 - protein, 10 aa, Homo sapiens
  Table 4 sequence identifier: P27987_C178
  MOD_RES (6)..(6): May or may not be conjugated to a chemical probe
RSPSPCPFRS

SEQ ID NO: 9512 - protein, 10 aa, Homo sapiens
  Table 4 sequence identifier: Q86W50_C432
  MOD_RES (4)..(4): May or may not be conjugated to a chemical probe
RTPCGPALRE

SEQ ID NO: 9513 - protein, 12 aa, Homo sapiens
  Table 4 sequence identifier: O15042_C320
  MOD_RES (3)..(3): May or may not be conjugated to a chemical probe
RNCGFVAFMNRR

SEQ ID NO: 9514 - protein, 18 aa, Homo sapiens
  Table 4 sequence identifier: Q8IY17_C409
  MOD_RES (2)..(2): May or may not be conjugated to a chemical probe
RCVSMPGDISGLQGGPRS

SEQ ID NO: 9515 - protein, 10 aa, Homo sapiens
  Table 4 sequence identifier: Q8TDD1_C586
  MOD_RES (4)..(4): May or may not be conjugated to a chemical probe
RDLCSQVMRA

SEQ ID NO: 9516 - protein, 15 aa, Homo sapiens
  Table 4 sequence identifier: Q13905_C474
  MOD_RES (13)..(13): May or may not be conjugated to a chemical probe
RSAASQTADGSGCRV

SEQ ID NO: 9517 - protein, 15 aa, Homo sapiens
  Table 4 sequence identifier: A4D1P6_C246
  MOD_RES (11)..(11): May or may not be conjugated to a chemical probe
RLGDSELAMVCSQRN

SEQ ID NO: 9518 - protein, 8 aa, Homo sapiens
  Table 4 sequence identifier: P78371_C535
  MOD_RES (8)..(8): May or may not be conjugated to a chemical probe
RVPDHHPC

SEQ ID NO: 9519 - protein, 13 aa, Homo sapiens
  Table 4 sequence identifier: Q08J23_C502
  MOD_RES (5)..(5): May or may not be conjugated to a chemical probe
KDGVCGPPPSKKM

SEQ ID NO: 9520 - protein, 20 aa, Homo sapiens
  Table 4 sequence identifier: Q8IV53_C781
  MOD_RES (17)..(17): May or may not be conjugated to a chemical probe
REEPGALNSPATPTSNCQKS

SEQ ID NO: 9521 - protein, 17 aa, Homo sapiens
  Table 4 sequence identifier: O94776_C261
  MOD_RES (15)..(15): May or may not be conjugated to a chemical probe
KAMSTLVPQGGPVLCRD

SEQ ID NO: 9522 - protein, 13 aa, Homo sapiens
  Table 4 sequence identifier: E7ENX8_C353
  MOD_RES (11)..(11): May or may not be conjugated to a chemical probe
RSFGAEEHEVCRY

SEQ ID NO: 9523 - protein, 18 aa, Homo sapiens
  Table 4 sequence identifier: Q09666_C2806
  MOD_RES (6)..(6): May or may not be conjugated to a chemical probe
KVDVECPDVNIEGPEGKW

SEQ ID NO: 9524 - protein, 10 aa, Homo sapiens
  Table 4 sequence identifier: Q63HN8_C2536
  MOD_RES (8)..(8): May or may not be conjugated to a chemical probe
KHSEEMICRL

SEQ ID NO: 9525 - protein, 10 aa, Homo sapiens
  Table 4 sequence identifier: Q96EP0_C59
  MOD_RES (2)..(2): May or may not be conjugated to a chemical probe
RCNAHGEPRN

SEQ ID NO: 9526 - protein, 10 aa, Homo sapiens
  Table 4 sequence identifier: Q86VP6_C1007
  MOD_RES (3)..(3): May or may not be conjugated to a chemical probe
KNCIGDFLKT

SEQ ID NO: 9527 - protein, 23 aa, Homo sapiens
  Table 4 sequence identifier: Q9H0J9_C474
  MOD_RES (14)..(14): May or may not be conjugated to a chemical probe
KYVSPQDVTTMQTCNTKFPGPKS

SEQ ID NO: 9528 - protein, 45 aa, Homo sapiens
  Table 4 sequence identifier: Q14966_C259
  MOD_RES (33)..(33): May or may not be conjugated to a chemical probe
RIYDPEIPTDEVENEFQSQQNISASVPNPNVICNSMFPVEDVFRQ

SEQ ID NO: 9529 - protein, 10 aa, Homo sapiens
  Table 4 sequence identifier: Q8WWW0_C225
  MOD_RES (5)..(5): May or may not be conjugated to a chemical probe
REKNCLGMKL

SEQ ID NO: 9530 - protein, 10 aa, Homo sapiens
  Table 4 sequence identifier: Q96K58_C126
  MOD_RES (7)..(7): May or may not be conjugated to a chemical probe
RFMQPVCLRV

SEQ ID NO: 9531 - protein, 19 aa, Homo sapiens
  Table 4 sequence identifier: Q12768_C385
  MOD_RES (12)..(12): May or may not be conjugated to a chemical probe
RWLMLHTADSACDPNNKRL

SEQ ID NO: 9532 - protein, 52 aa, Homo sapiens; identical to SEQ ID NO: 8886
  Table 4 sequence identifier: Q96CW5_C168
  MOD_RES (23)..(23): May or may not be conjugated to a chemical probe

SEQ ID NO: 9533 - protein, 19 aa, Homo sapiens
  Table 4 sequence identifier: Q9BYW2_C1471
  MOD_RES (4)..(4): May or may not be conjugated to a chemical probe
KMPCYFDLIEENVYLTERK

SEQ ID NO: 9534 - protein, 18 aa, Homo sapiens
  Table 4 sequence identifier: Q7Z2W4_C518
  MOD_RES (16)..(16): May or may not be conjugated to a chemical probe
RVDDHDSEEICLDHLCKG

SEQ ID NO: 9535 - protein, 15 aa, Homo sapiens
  Table 4 sequence identifier: Q6XQN6_C533
  MOD_RES (10)..(10): May or may not be conjugated to a chemical probe
RLQALVNSLCAGQSP

SEQ ID NO: 9536 - protein, 10 aa, Homo sapiens
  Table 4 sequence identifier: Q9Y6K9_C347
  MOD_RES (4)..(4): May or may not be conjugated to a chemical probe
KASCQESARI

SEQ ID NO: 9537 - protein, 10 aa, Homo sapiens
  Table 4 sequence identifier: P11142_C603
  MOD_RES (3)..(3): May or may not be conjugated to a chemical probe
KVCNPIITKL

SEQ ID NO: 9538 - protein, 11 aa, Homo sapiens
  Table 4 sequence identifier: I3L2F9_C269
  MOD_RES (7)..(7): May or may not be conjugated to a chemical probe
KNMMAACDPRH

SEQ ID NO: 9539 - protein, 11 aa, Homo sapiens
  Table 4 sequence identifier: I3L2F9_C320
  MOD_RES (5)..(5): May or may not be conjugated to a chemical probe
KTAVCDIPPRG

SEQ ID NO: 9540 - protein, 23 aa, Homo sapiens
  Table 4 sequence identifier: Q96JB2_C349
  MOD_RES (11)..(11): May or may not be conjugated to a chemical probe
RELLLGPSIACTVAELTSQNNRD

SEQ ID NO: 9541 - protein, 12 aa, Homo sapiens
  Table 4 sequence identifier: A2A288_C517
  MOD_RES (2)..(2): May or may not be conjugated to a chemical probe
RCQSAGAPLGKP

SEQ ID NO: 9542 - protein, 12 aa, Homo sapiens
  Table 4 sequence identifier: Q9NR33_C85
  MOD_RES (6)..(6): May or may not be conjugated to a chemical probe
KDAYCCAQQGKR

SEQ ID NO: 9543 - protein, 11 aa, Homo sapiens
  Table 4 sequence identifier: Q8IXQ6_C728
  MOD_RES (7)..(7): May or may not be conjugated to a chemical probe
RMYSTPCDPKY

SEQ ID NO: 9544 - protein, 16 aa, Homo sapiens
  Table 4 sequence identifier: Q13422_C254
  MOD_RES (14)..(14): May or may not be conjugated to a chemical probe
KEETNHSEMAEDLCKI

SEQ ID NO: 9545 - protein, 17 aa, Homo sapiens
  Table 4 sequence identifier: Q14151_C361
  MOD_RES (8)..(8): May or may not be conjugated to a chemical probe
RKFDFDACNEVPPAPKE

SEQ ID NO: 9546 - protein, 9 aa, Homo sapiens
  Table 4 sequence identifier: Q8TDX7_C298
  MOD_RES (5)..(5): May or may not be conjugated to a chemical probe
RMHACTASS

SEQ ID NO: 9547 - protein, 10 aa, Homo sapiens
  Table 4 sequence identifier: P61962_C256
  MOD_RES (4)..(4): May or may not be conjugated to a chemical probe
RVPCTPVARL

SEQ ID NO: 9548 - protein, 14 aa, Homo sapiens
  Table 4 sequence identifier: Q00653_C738
  MOD_RES (10)..(10): May or may not be conjugated to a chemical probe
RGHTPLDLTCSTKV

SEQ ID NO: 9549 - protein, 19 aa, Homo sapiens
  Table 4 sequence identifier: O95671_C274
  MOD_RES (16)..(16): May or may not be conjugated to a chemical probe
KAEAGEAGQATAEAECHRT

SEQ ID NO: 9550 - protein, 35 aa, Homo sapiens
  Table 4 sequence identifier: Q92619_C599
  MOD_RES (24)..(24): May or may not be conjugated to a chemical probe
KSSFNVSDVARPEAAGSPPEEGGCTEGTPAKDHRA

SEQ ID NO: 9551 - protein, 24 aa, Homo sapiens
  Table 4 sequence identifier: Q9UJV9_C568
  MOD_RES (11)..(11): May or may not be conjugated to a chemical probe
KVPPVLQVLHCGDESMLDIGGERG

SEQ ID NO: 9552 - protein, 15 aa, Homo sapiens
  Table 4 sequence identifier: C9J4G0_C66
  MOD_RES (11)..(11): May or may not be conjugated to a chemical probe
RFGDDLNHISCVIKE

SEQ ID NO: 9553 - protein, 31 aa, Homo sapiens
  Table 4 sequence identifier: I3L1I5_C221
  MOD_RES (3)..(3): May or may not be conjugated to a chemical probe
RACMSASPGGAHSNLTWFEFLSESEDGAGKN

SEQ ID NO: 9554 - protein, 9 aa, Homo sapiens
  Table 4 sequence identifier: Q9Y6I9_C165
  MOD_RES (4)..(4): May or may not be conjugated to a chemical probe
RKLCAYPRL

SEQ ID NO: 9555 - protein, 9 aa, Homo sapiens
  Table 4 sequence identifier: Q66K14_C289
  MOD_RES (6)..(6): May or may not be conjugated to a chemical probe
RAKNECYRA

SEQ ID NO: 9556 - protein, 24 aa, Homo sapiens
  Table 4 sequence identifier: Q16875_C155
  MOD_RES (9)..(9): May or may not be conjugated to a chemical probe
KAFFIESVCDDPTVVASNIMEVKI

SEQ ID NO: 9557 - protein, 12 aa, Homo sapiens
  Table 4 sequence identifier: Q9UJX3_C329
  MOD_RES (10)..(10): May or may not be conjugated to a chemical probe
RLEDVENLGCRL

SEQ ID NO: 9558 - protein, 13 aa, Homo sapiens
  Table 4 sequence identifier: Q9NR56_C27
  MOD_RES (4)..(4): May or may not be conjugated to a chemical probe
RGTCSRPDTECKF

SEQ ID NO: 9559 - protein, 11 aa, Homo sapiens
  Table 4 sequence identifier: Q96L21_C105
  MOD_RES (5)..(5): May or may not be conjugated to a chemical probe
KMLSCAGADRL

SEQ ID NO: 9560 - protein, 23 aa, Homo sapiens
  Table 4 sequence identifier: P03989_C349
  MOD_RES (10)..(10): May or may not be conjugated to a chemical probe
KGGSYSQAACSDSAQGSDVSLTA

SEQ ID NO: 9561 - protein, 20 aa, Homo sapiens
  Table 4 sequence identifier: Q9Y4W2_C469
  MOD_RES (6)..(6): May or may not be conjugated to a chemical probe
RMVESCLGSPCWASPQLLRI

SEQ ID NO: 9562 - protein, 10 aa, Homo sapiens
  Table 4 sequence identifier: Q9P258_C144
  MOD_RES (4)..(4): May or may not be conjugated to a chemical probe
RYGCLAGVRV

SEQ ID NO: 9563 - protein, 27 aa, Homo sapiens
  Table 4 sequence identifier: Q96BX8_C88
  MOD_RES (18)..(18): May or may not be conjugated to a chemical probe
RVNLIYGTISDGCTEQSCPVMSGGPKY

SEQ ID NO: 9564 - protein, 16 aa, Homo sapiens
  Table 4 sequence identifier: Q9BW27_C51
  MOD_RES (8)..(8): May or may not be conjugated to a chemical probe
KSEMVPSCPFIYIIRK

SEQ ID NO: 9565 - protein, 16 aa, Homo sapiens
  Table 4 sequence identifier: Q9H582_C507
  MOD_RES (13)..(13): May or may not be conjugated to a chemical probe
RLQCPQCVFGTNCPKT

SEQ ID NO: 9566 - protein, 18 aa, Homo sapiens
  Table 4 sequence identifier: Q9H4A6_C84
  MOD_RES (11)..(11): May or may not be conjugated to a chemical probe
KEGYTSFWNDCISSGLRG

SEQ ID NO: 9567 - protein, 18 aa, Homo sapiens
  Table 4 sequence identifier: Q9H4A5_C70
  MOD_RES (11)..(11): May or may not be conjugated to a chemical probe
KEGYTSFWNDCISSGLRG

SEQ ID NO: 9568 - protein, 26 aa, Homo sapiens
  Table 4 sequence identifier: Q96DM3_C333
  MOD_RES (24)..(24): May or may not be conjugated to a chemical probe
RSIQPYQIPITGPAAVTSQSPVPCKL

SEQ ID NO: 9569 - protein, 15 aa, Homo sapiens
  Table 4 sequence identifier: P06239_C378
  MOD_RES (13)..(13): May or may not be conjugated to a chemical probe
RAANILVSDTLSCKI

SEQ ID NO: 9570 - protein, 13 aa, Homo sapiens
  Table 4 sequence identifier: Q95365_C125
  MOD_RES (5)..(5): May or may not be conjugated to a chemical probe
RMYGCDVGPDGRL

SEQ ID NO: 9571 - protein, 13 aa, Homo sapiens
  Table 4 sequence identifier: P30453_C125
  MOD_RES (5)..(5): May or may not be conjugated to a chemical probe
RMYGCDVGPDGRF

SEQ ID NO: 9572 - protein, 13 aa, Homo sapiens
  Table 4 sequence identifier: P30479_C125
  MOD_RES (5)..(5): May or may not be conjugated to a chemical probe
RMYGCDVGPDGRF

SEQ ID NO: 9573 - protein, 13 aa, Homo sapiens
  Table 4 sequence identifier: Q29836_C125
  MOD_RES (5)..(5): May or may not be conjugated to a chemical probe
RMYGCDVGPDGRL

SEQ ID NO: 9574 - protein, 13 aa, Homo sapiens
  Table 4 sequence identifier: P30466_C125
  MOD_RES (5)..(5): May or may not be conjugated to a chemical probe
RMYGCDVGPDGRF

SEQ ID NO: 9575 - protein, 13 aa, Homo sapiens
  Table 4 sequence identifier: P30462_C125
  MOD_RES (5)..(5): May or may not be conjugated to a chemical probe
RMYGCDVGPDGRF

SEQ ID NO: 9576 - protein, 13 aa, Homo sapiens
  Table 4 sequence identifier: P30460_C125
  MOD_RES (5)..(5): May or may not be conjugated to a chemical probe
RMYGCDVGPDGRF

SEQ ID NO: 9577 - protein, 13 aa, Homo sapiens
  Table 4 sequence identifier: P01892_C125
  MOD_RES (5)..(5): May or may not be conjugated to a chemical probe
RMYGCDVGSDWRF

SEQ ID NO: 9578 - protein, 9 aa, Homo sapiens
  Table 4 sequence identifier: Q9H7Z7_C110
  MOD_RES (3)..(3): May or may not be conjugated to a chemical probe
KTCPFCSKV

SEQ ID NO: 9579 - protein, 23 aa, Homo sapiens
  Table 4 sequence identifier: Q8TEU7_C1368
  MOD_RES (7)..(7): May or may not be conjugated to a chemical probe
RGSWTSCSSSSHDNFQSLPNPKS

SEQ ID NO: 9580 - protein, 17 aa, Homo sapiens
  Table 4 sequence identifier: Q14CN2_C308
  MOD_RES (4)..(4): May or may not be conjugated to a chemical probe
RIVCLVLDKSGSMGGKD

SEQ ID NO: 9581 - protein, 20 aa, Homo sapiens
  Table 4 sequence identifier: Q96FK6_C82
  MOD_RES (6)..(6): May or may not be conjugated to a chemical probe
RFANSCDSVYSACTDGTVKC

SEQ ID NO: 9582 - protein, 14 aa, Homo sapiens
  Table 4 sequence identifier: Q95365_C188
  MOD_RES (8)..(8): May or may not be conjugated to a chemical probe
RTYLEGTCVEWLRR

SEQ ID NO: 9583 - protein, 14 aa, Homo sapiens
  Table 4 sequence identifier: Q29836_C188
  MOD_RES (8)..(8): May or may not be conjugated to a chemical probe
RTYLEGTCVEWLRR

SEQ ID NO: 9584 - protein, 32 aa, Homo sapiens; identical to SEQ ID NO: 3431
  Table 4 sequence identifier: O14981_C939
  MOD_RES (19)..(19): May or may not be conjugated to a chemical probe

SEQ ID NO: 9585 - protein, 22 aa, Homo sapiens
  Table 4 sequence identifier: Q9NXC5_C799
  MOD_RES (16)..(16): May or may not be conjugated to a chemical probe
RCALCLINMGTPVSSCPGGTKS

SEQ ID NO: 9586 - protein, 24 aa, Homo sapiens
  Table 4 sequence identifier: Q13613_C117
  MOD_RES (7)..(7): May or may not be conjugated to a chemical probe
KDVMYICPFMGAVSGTLTVTDFKL

SEQ ID NO: 9587 - protein, 25 aa, Homo sapiens
  Table 4 sequence identifier: Q8IYL3_C215
  MOD_RES (19)..(19): May or may not be conjugated to a chemical probe
RFFGNVELMQDLPPASSSCPSMSRR

SEQ ID NO: 9588 - protein, 18 aa, Homo sapiens
  Table 4 sequence identifier: Q14289_C899
  MOD_RES (5)..(5): May or may not be conjugated to a chemical probe
KNELCQLPPEGYVVVVKN

SEQ ID NO: 9589 - protein, 11 aa, Homo sapiens
  Table 4 sequence identifier: P26358_C62
  MOD_RES (5)..(5): May or may not be conjugated to a chemical probe
KNQLCDLETKL

SEQ ID NO: 9590 - protein, 22 aa, Homo sapiens
  Table 4 sequence identifier: Q7RTR2_C561
  MOD_RES (19)..(19): May or may not be conjugated to a chemical probe
RTQVAELLQGCLRPDAAVCARA

SEQ ID NO: 9591 - protein, 12 aa, Homo sapiens
  Table 4 sequence identifier: Q9UKA4_C1488
  MOD_RES (7)..(7): May or may not be conjugated to a chemical probe
KSLTDSCLFEKS

SEQ ID NO: 9592 - protein, 10 aa, Homo sapiens
  Table 4 sequence identifier: O76075_C194
  MOD_RES (7)..(7): May or may not be conjugated to a chemical probe
RVLGSMCQRL

SEQ ID NO: 9593 - protein, 31 aa, Homo sapiens
  Table 4 sequence identifier: O00221_C187
  MOD_RES (22)..(22): May or may not be conjugated to a chemical probe
RSLPESTSAPASGPSDGSPQPCTHPPGPVKE

SEQ ID NO: 9594 - protein, 22 aa, Homo sapiens
  Table 4 sequence identifier: Q96F46_C703
  MOD_RES (11)..(11): May or may not be conjugated to a chemical probe
RLALAGEGEACPLLGSPGAGRN

SEQ ID NO: 9595 - protein, 11 aa, Homo sapiens
  Table 4 sequence identifier: P36776_C682
  MOD_RES (4)..(4): May or may not be conjugated to a chemical probe
RALCGLDESKA

SEQ ID NO: 9596 - protein, 16 aa, Homo sapiens
  Table 4 sequence identifier: Q9UGK8_C189
  MOD_RES (3)..(3): May or may not be conjugated to a chemical probe
RLCPGQTLPLFFTAKE

SEQ ID NO: 9597 - protein, 11 aa, Homo sapiens
  Table 4 sequence identifier: Q9HAV4_C1131
  MOD_RES (9)..(9): May or may not be conjugated to a chemical probe
KDSLDQFDCKL

SEQ ID NO: 9598 - protein, 9 aa, Homo sapiens
  Table 4 sequence identifier: P38646_C366
  MOD_RES (6)..(6): May or may not be conjugated to a chemical probe
RTIAPCQKA

SEQ ID NO: 9599 - protein, 19 aa, Homo sapiens
  Table 4 sequence identifier: P30084_C213
  MOD_RES (3)..(3): May or may not be conjugated to a chemical probe
KICPVETLVEEAIQCAEKI

SEQ ID NO: 9600 - protein, 21 aa, Homo sapiens
  Table 4 sequence identifier: Q9Y3P8_C126
  MOD_RES (8)..(8): May or may not be conjugated to a chemical probe
RAAEEVMCYTSLQLRPPQGRI

SEQ ID NO: 9601 - protein, 37 aa, Homo sapiens; identical to SEQ ID NO: 4999
  Table 4 sequence identifier: Q92844_C328
  MOD_RES (4)..(4): May or may not be conjugated to a chemical probe

SEQ ID NO: 9602 - protein, 20 aa, Homo sapiens
  Table 4 sequence identifier: Q9NR50_C281
  MOD_RES (14)..(14): May or may not be conjugated to a chemical probe
KEANTLNLAPYDACWNACRG

SEQ ID NO: 9603 - protein, 13 aa, Homo sapiens
  Table 4 sequence identifier: P36969_C102
  MOD_RES (7)..(7): May or may not be conjugated to a chemical probe
RILAFPCNQFGKQ

SEQ ID NO: 9604 - protein, 13 aa, Homo sapiens
  Table 4 sequence identifier: P29144_C787
  MOD_RES (8)..(8): May or may not be conjugated to a chemical probe
KYEDLAPCITLKN

SEQ ID NO: 9605 - protein, 29 aa, Homo sapiens
  Table 4 sequence identifier: P40121_C282
  MOD_RES (18)..(18): May or may not be conjugated to a chemical probe
KVADSSPFALELLISDDCFVLDNGLCGKI

SEQ ID NO: 9606 - protein, 37 aa, Homo sapiens
  Table 4 sequence identifier: Q5JSL3_C592
  MOD_RES (15)..(15): May or may not be conjugated to a chemical probe
KLQIIPGQLNITVECVPVDLSNCITSSYVPLKPFEKN

SEQ ID NO: 9607 - protein, 21 aa, Homo sapiens
  Table 4 sequence identifier: P52306_C85
  MOD_RES (4)..(4): May or may not be conjugated to a chemical probe
RIPCVDAGLISPLVQLLNSKD

SEQ ID NO: 9608 - protein, 8 aa, Homo sapiens
  Table 4 sequence identifier: P61978_C205
  MOD_RES (5)..(5): May or may not be conjugated to a chemical probe
RVVECIKI

SEQ ID NO: 9609 - protein, 11 aa, Homo sapiens
  Table 4 sequence identifier: P35250_C88
  MOD_RES (7)..(7): May or may not be conjugated to a chemical probe
KTTSILCLARA

SEQ ID NO: 9610 - protein, 16 aa, Homo sapiens
  Table 4 sequence identifier: Q96PY6_C276
  MOD_RES (13)..(13): May or may not be conjugated to a chemical probe
KFLSPQLIAEEFCLKT

SEQ ID NO: 9611 - protein, 21 aa, Homo sapiens
  Table 4 sequence identifier: Q9Y5J1_C90
  MOD_RES (2)..(2): May or may not be conjugated to a chemical probe
RCLEELVFGDVENDEDALLRR

SEQ ID NO: 9612 - protein, 19 aa, Homo sapiens
  Table 4 sequence identifier: O95365_C123
  MOD_RES (12)..(12): May or may not be conjugated to a chemical probe
RLLEIPAVSHVCADLLDRQ

SEQ ID NO: 9613 - protein, 18 aa, Homo sapiens
  Table 4 sequence identifier: Q9ULG1_C1001
  MOD_RES (2)..(2): May or may not be conjugated to a chemical probe
RCLLTELPSFLCVASPRV

SEQ ID NO: 9614 - protein, 19 aa, Homo sapiens
  Table 4 sequence identifier: O95801_C63
  MOD_RES (8)..(8): May or may not be conjugated to a chemical probe
RENPDLACLQSIIFDEERS

SEQ ID NO: 9615 - protein, 20 aa, Homo sapiens
  Table 4 sequence identifier: P57772_C55
  MOD_RES (11)..(11): May or may not be conjugated to a chemical probe
RGITLDLGFSCFSVPLPARL

SEQ ID NO: 9616 - protein, 21 aa, Homo sapiens
  Table 4 sequence identifier: Q96FE7_C228
  MOD_RES (14)..(14): May or may not be conjugated to a chemical probe
RITLPLSAFTNPTCEIVDEKT

SEQ ID NO: 9617 - protein, 10 aa, Homo sapiens
  Table 4 sequence identifier: Q92945_C176
  MOD_RES (8)..(8): May or may not be conjugated to a chemical probe
KIQQDSGCKV

SEQ ID NO: 9618 - protein, 20 aa, Homo sapiens
  Table 4 sequence identifier: P15121_C304
  MOD_RES (8)..(8): May or may not be conjugated to a chemical probe
RVCALLSCTSHKDYPFHEEF

SEQ ID NO: 9619 - protein, 19 aa, Homo sapiens
  Table 4 sequence identifier: Q15149_C3017
  MOD_RES (11)..(11): May or may not be conjugated to a chemical probe
RCVEDPETGLCLLPLTDKA

SEQ ID NO: 9620 - protein, 13 aa, Homo sapiens
  Table 4 sequence identifier: Q12849_C476
  MOD_RES (10)..(10): May or may not be conjugated to a chemical probe
RYIELFLNSCPKG

SEQ ID NO: 9621 - protein, 16 aa, Homo sapiens
  Table 4 sequence identifier: P55160_C338
  MOD_RES (13)..(13): May or may not be conjugated to a chemical probe
KEHVIANSGQFHCQRR

SEQ ID NO: 9622 - protein, 21 aa, Homo sapiens
  Table 4 sequence identifier: P50990_C430
  MOD_RES (10)..(10): May or may not be conjugated to a chemical probe
KQITSYGETCPGLEQYAIKKF

SEQ ID NO: 9623 - protein, 11 aa, Homo sapiens
  Table 4 sequence identifier: P53597_C60
  MOD_RES (4)..(4): May or may not be conjugated to a chemical probe
KIICQGFTGKQ

SEQ ID NO: 9624 - protein, 8 aa, Homo sapiens
  Table 4 sequence identifier: Q9Y277_C229
  MOD_RES (6)..(6): May or may not be conjugated to a chemical probe
KYMLDCRT

SEQ ID NO: 9625 - protein, 13 aa, Homo sapiens
  Table 4 sequence identifier: P30481_C125
  MOD_RES (5)..(5): May or may not be conjugated to a chemical probe
RMYGCDVGPDGRL

SEQ ID NO: 9626 - protein, 13 aa, Homo sapiens
  Table 4 sequence identifier: P04222_C125
  MOD_RES (5)..(5): May or may not be conjugated to a chemical probe
RMYGCDVGPDGRL

SEQ ID NO: 9627 - protein, 29 aa, Homo sapiens
  Table 4 sequence identifier: Q96L91_C162
  MOD_RES (12)..(12): May or may not be conjugated to a chemical probe
RAGAPGPGLGLCSSSPTGGFVDASVLVRQ

SEQ ID NO: 9628 - protein, 15 aa, Homo sapiens
  Table 4 sequence identifier: Q9Y4E8_C264
  MOD_RES (6)..(6): May or may not be conjugated to a chemical probe
KNSNYCLPSYTAYKN

SEQ ID NO: 9629 - protein, 18 aa, Homo sapiens
  Table 4 sequence identifier: Q8IZH2_C1450
  MOD_RES (3)..(3): May or may not be conjugated to a chemical probe
RICSLVGMPQPDFSFLRM

SEQ ID NO: 9630 - protein, 16 aa, Homo sapiens
  Table 4 sequence identifier: Q29RF7_C581
  MOD_RES (12)..(12): May or may not be conjugated to a chemical probe
RSQLELLISPTCSCKQ

SEQ ID NO: 9631 - protein, 12 aa, Homo sapiens
  Table 4 sequence identifier: Q3KQU3_C251
  MOD_RES (2)..(2): May or may not be conjugated to a chemical probe
RCSVSAVNLPKH

SEQ ID NO: 9632 - protein, 22 aa, Homo sapiens
  Table 4 sequence identifier: O60318_C1864
  MOD_RES (12)..(12): May or may not be conjugated to a chemical probe
RGASAEELLAQCLSSSLLLEKE

SEQ ID NO: 9633 - protein, 9 aa, Homo sapiens
  Table 4 sequence identifier: Q9NT62_C182
  MOD_RES (7)..(7): May or may not be conjugated to a chemical probe
RKIVEACKA

SEQ ID NO: 9634 - protein, 18 aa, Homo sapiens
  Table 4 sequence identifier: Q14511_C18
  MOD_RES (10)..(10): May or may not be conjugated to a chemical probe
RALYDNVPECAEELAFRK

SEQ ID NO: 9635 - protein, 9 aa, Homo sapiens
  Table 4 sequence identifier: O00139_C406
  MOD_RES (2)..(2): May or may not be conjugated to a chemical probe
KCVEDVLKL

SEQ ID NO: 9636 - protein, 18 aa, Homo sapiens
  Table 4 sequence identifier: P09914_C138
  MOD_RES (4)..(4): May or may not be conjugated to a chemical probe
RMECPEIDCEEGWALLKC

SEQ ID NO: 9637 - protein, 21 aa, Homo sapiens
  Table 4 sequence identifier: O60216_C35
  MOD_RES (7)..(7): May or may not be conjugated to a chemical probe
KAHVFECNLESSVESIISPKV

SEQ ID NO: 9638 - protein, 26 aa, Homo sapiens
  Table 4 sequence identifier: P04222_C345
  MOD_RES (5)..(5): May or may not be conjugated to a chemical probe
KGGSCSQAASSNSAQGSDESLIACKA

SEQ ID NO: 9639 - protein, 33 aa, Homo sapiens
  Table 4 sequence identifier: P57764_C38
  MOD_RES (28)..(28): May or may not be conjugated to a chemical probe
RVVQELDHGGEFIPVTSLQSSTGFQPYCLVVRK

SEQ ID NO: 9640 - protein, 14 aa, Homo sapiens
  Table 4 sequence identifier: Q9Y520_C2340
  MOD_RES (12)..(12): May or may not be conjugated to a chemical probe
KSTTTSDPPNICKV

SEQ ID NO: 9641 - protein, 10 aa, Homo sapiens
  Table 4 sequence identifier: P62913_C150
  MOD_RES (5)..(5): May or may not be conjugated to a chemical probe
RRTGCIGAKH

SEQ ID NO: 9642 - protein, 17 aa, Homo sapiens
  Table 4 sequence identifier: Q9Y2Y0_C149
  MOD_RES (15)..(15): May or may not be conjugated to a chemical probe
RGLDLSSGLVVTSLCKS

SEQ ID NO: 9643 - protein, 10 aa, Homo sapiens
  Table 4 sequence identifier: Q16514_C143
  MOD_RES (3)..(3): May or may not be conjugated to a chemical probe
KACTTEAHKQ

SEQ ID NO: 9644 - protein, 10 aa, Homo sapiens
  Table 4 sequence identifier: O14526_C571
  MOD_RES (5)..(5): May or may not be conjugated to a chemical probe
RKVSCPLTRS

SEQ ID NO: 9645 - protein, 21 aa, Homo sapiens
  Table 4 sequence identifier: Q6F5E8_C1339
  MOD_RES (16)..(16): May or may not be conjugated to a chemical probe
RTSPSPDSLGLPEDPCLGPRN

SEQ ID NO: 9646 - protein, 14 aa, Homo sapiens
  Table 4 sequence identifier: Q9H7N4_C362
  MOD_RES (12)..(12): May or may not be conjugated to a chemical probe
RVFVVGTEAEACRE

SEQ ID NO: 9647 - protein, 20 aa, Homo sapiens
  Table 4 sequence identifier: Q8WW01_C13
  MOD_RES (10)..(10): May or may not be conjugated to a chemical probe
RGDSEPTPGCSGLGPGGVRG

SEQ ID NO: 9648 - protein, 13 aa, Homo sapiens
  Table 4 sequence identifier: O15226_C424
  MOD_RES (5)..(5): May or may not be conjugated to a chemical probe
KSSQCHTGSSPRG

SEQ ID NO: 9649 - protein, 22 aa, Homo sapiens
  Table 4 sequence identifier: P40763_C712
  MOD_RES (4)..(4): May or may not be conjugated to a chemical probe
KFICVTPTTCSNTIDLPMSPRT

SEQ ID NO: 9650 - protein, 25 aa, Homo sapiens
  Table 4 sequence identifier: Q92608_C1083
  MOD_RES (3)..(3): May or may not be conjugated to a chemical probe
KICFIPGMVGPILEMTLIPEAELRK

SEQ ID NO: 9651 - protein, 9 aa, Homo sapiens
  Table 4 sequence identifier: Q8TDZ2_C837
  MOD_RES (3)..(3): May or may not be conjugated to a chemical probe
RSCSALARH

SEQ ID NO: 9652 - protein, 45 aa, Homo sapiens; identical to SEQ ID NO: 536
  Table 4 sequence identifier: Q9NRA8_C318
  MOD_RES (26)..(26): May or may not be conjugated to a chemical probe

SEQ ID NO: 9653 - protein, 12 aa, Homo sapiens
  Table 4 sequence identifier: P29590_C227
  MOD_RES (2)..(2): May or may not be conjugated to a chemical probe
KCDISAEIQQRQ

SEQ ID NO: 9654 - protein, 10 aa, Homo sapiens
  Table 4 sequence identifier: Q9UBU9_C252
  MOD_RES (3)..(3): May or may not be conjugated to a chemical probe
RSCMAATLRI

SEQ ID NO: 9655 - protein, 14 aa, Homo sapiens
  Table 4 sequence identifier: P61586_C159
  MOD_RES (10)..(10): May or may not be conjugated to a chemical probe
RIGAFGYMECSAKT

SEQ ID NO: 9656 - protein, 414 aa, Homo sapiens
  Table 5 sequence identifier: O75874_C269
  MOD_RES (269)..(269): May or may not be conjugated to a chemical probe
MSKKISGGSVVEMQGDEMTRIIWELIKEKLIFPYVELDLHSYDLGIENRDATNDQVTKDAAEAIKKHNVGVKCATITPDEKRVEEFKLKQMWKSPNGTIRNILGGTVFREAIICKNIPRLVSGWVKPIIIGRHAYGDQYRATDFVVPGPGKVEITYTPSDGTQKVTYLVHNFEEGGGVAMGMYNQDKSIEDFAHSSFQMALSKGWPLYLSTKNTILKKYDGRFKDIFQEIYDKQYKSQFEAQKIWYEHRLIDDMVAQAMKSEGGFIWACKNYDGDVQSDSVAQGYGSLGMMTSVLVCPDGKTVEAEAAHGTVTRHYRMYQKGQETSTNPIASIFAWTRGLAHRAKLDNNKELAFFANALEEVSIETIEAGFMTKDLAACIKGLPNVQRSDYLNTFEFMDKLGENLKIKLAQAKL

SEQ ID NO: 9657 - protein, 452 aa, Homo sapiens
  Table 5 sequence identifier: P48735_C308
  MOD_RES (308)..(308): May or may not be conjugated to a chemical probe
MAGYLRVVRSLCRASGSRPAWAPAALTAPTSQEQPRRHYADKRIKVAKPVVEMDGDEMTRIIWQFIKEKLILPHVDIQLKYFDLGLPNRDQTDDQVTIDSALATQKYSVAVKCATITPDEARVEEFKLKKMWKSPNGTIRNILGGTVFREPIICKNIPRLVPGWTKPITIGRHAHGDQYKATDFVADRAGTFKMVFTPKDGSGVKEWEVYNFPAGGVGMGMYNTDESISGFAHSCFQYAIQKKWPLYMSTKNTILKAYDGRFKDIFQEIFDKHYKTDFDKNKIWYEHRLIDDMVAQVLKSSGGFVWACKNYDGDVQSDILAQGFGSLGLMTSVLVCPDGKTIEAEAAHGTVTRHYREHQKGRPTSTNPIASIFAWTRGLEHRGKLDGNQDLIRFAQMLEKVCVETVESGAMTKDLAGCIHGLSNVKLNEHFLNTTDFLDTIKSNLDRALGRQ

SEQ ID NO: 9658 - protein, 479 aa, Homo sapiens
  Table 5 sequence identifier: Q14790_C360
  MOD_RES (360)..(360): May or may not be conjugated to a chemical probe
MDFSRNLYDIGEQLDSEDLASLKFLSLDYIPQRKQEPIKDALMLFQRLQEKRMLEESNLSFLKELLFRINRLDLLITYLNTRKEEMERELQTPGRAQISAYRVMLYQISEEVSRSELRSFKFLLQEEISKCKLDDDMNLLDIFIEMEKRVILGEGKLDILKRVCAQINKSLLKIINDYEEFSKERSSSLEGSPDEFSNGEELCGVMTISDSPREQDSESQTLDKVYQMKSKPRGYCLIINNHNFAKAREKVPKLHSIRDRNGTHLDAGALTTTFEELHFEIKPHDDCTVEQIYEILKIYQLMDHSNMDCFICCILSHGDKGIIYGTDGQEAPIYELTSQFTGLKCPSLAGKPKVFFIQACQGDNYQKGIPVETDSEEQPYLEMDLSSPQTRYIPDEADFLLGMATVNNCVSYRNPAEGTWYIQSLCQSLRERCPRGDDILTILTEVNYEVSNKDDKKNMGKQMPQPTFTLRKKLVFPSD

SEQ ID NO: 9659 - protein, 521 aa, Homo sapiens
  Table 5 sequence identifier: Q92851_C401
  MOD_RES (401)..(401): May or may not be conjugated to a chemical probe
MKSQGQHWYSSSDKNCKVSFREKLLIIDSNLGVQDVENLKFLCIGLVPNKKLEKSSSASDVFEHLLAEDLLSEEDPFFLAELLYIIRQKKLLQHLNCTKEEVERLLPTRQRVSLFRNLLYELSEGIDSENLKDMIFLLKDSLPKTEMTSLSFLAFLEKQGKIDEDNLTCLEDLCKTVVPKLLRNIEKYKREKAIQIVTPPVDKEAESYQGEEELVSQTDVKTFLEALPQESWQNKHAGSNGNRATNGAPSLVSRGMQGASANTLNSETSTKRAAVYRMNRNHRGLCVIVNNHSFTSLKDRQGTHKDAEILSHVFQWLGFTVHIHNNVTKVEMEMVLQKQKCNPAHADGDCFVFCILTHGRFGAVYSSDEALIPIREIMSHFTALQCPRLAEKPKLFFIQACQGEEIQPSVSIEADALNPEQAPTSLQDSIPAEADFLLGLATVPGYVSFRHVEEGSWYIQSLCNHLKKLVPRMLKFLEKTMEIRGRKRTVWGAKQISATSLPTAISAQTPRPPMRRWSSVS

SEQ ID NO: 9660 - protein, 361 aa, Homo sapiens
  Table 5 sequence identifier: Q99873_C109
  MOD_RES (109)..(109): May or may not be conjugated to a chemical probe
MENFVATLANGMSLQPPLEEVSCGQAESSEKPNAEDMTSKDYYFDSYAHFGIHEEMLKDEVRTLTYRNSMFHNRHLFKDKVVLDVGSGTGILCMFAAKAGARKVIGIECSSISDYAVKIVKANKLDHVVTIIKGKVEEVELPVEKVDIIISEWMGYCLFYESMLNTVLYARDKWLAPDGLIFPDRATLYVTAIEDRQYKDYKIHWWENVYGFDMSCIKDVAIKEPLVDVVDPKQLVTNACLIKEVDIYTVKVEDLTFTSPFCLQVKRNDYVHALVAYFNIEFTRCHKRTGFSTSPESPYTHWKQTVFYMEDYLTVKTGEEIFGTIGMRPNAKNNRDLDFTIDLDFKGQLCELSCSTDYRMR

SEQ ID NO: 9661 - protein, 800 aa, Homo sapiens
  Table 5 sequence identifier: Q9NYL2_C22
  MOD_RES (22)..(22): May or may not be conjugated to a chemical probe
MSSLGASFVQIKFDDLQFFENCGGGSFGSVYRAKWISQDKEVAVKKLLKIEKEAEILSVLSHRNIIQFYGVILEPPNYGIVTEYASLGSLYDYINSNRSEEMDMDHIMTWATDVAKGMHYLHMEAPVKVIHRDLKSRNVVIAADGVLKICDFGASRFHNHTTHMSLVGTFPWMAPEVIQSLPVSETCDTYSYGVVLWEMLTREVPFKGLEGLQVAWLVVEKNERLTIPSSCPRSFAELLHQCWEADAKKRPSFKQIISILESMSNDTSLPDKCNSFLHNKAEWRCEIEATLERLKKLERDLSFKEQELKERERRLKMWEQKLTEQSNTPLLPSFEIGAWTEDDVYCWVQQLVRKGDSSAEMSVYASLFKENNITGKRLLLLEEEDLKDMGIVSKGHIIHFKSAIEKLTHDYINLFHFPPLIKDSGGEPEENEEKIVNLELVFGFHLKPGTGPQDCKWKMYMEMDGDEIAITYIKDVTFNTNLPDAEILKMTKPPFVMEKWIVGIAKSQTVECTVTYESDVRTPKSTKHVHSIQWSRTKPQDEVKAVQLAIQTLFTNSDGNPGSRSDSSADCQWLDTLRMRQIASNTSLQRSQSNPILGSPFFSHFDGQDSYAAAVRRPQVPIKYQQITPVNQSRSSSPTQYGLTKNFSSLHLNSRDSGFSSGNTDTSSERGRYSDRSRNKYGRGSISLNSSPRGRYSGKSQHSTPSRGRYPGKFYRVSQSALNPHQSPDFKRSPRDLHQPNTIPGMPLHPETDSRASEEDSKVSEGGWTKVEYRKKPHRPSPAKTNKERARGDHRGWRNF

SEQ ID NO: 9662 - protein, 514 aa, Homo sapiens
  Table 5 sequence identifier: P12268_C140, C331
  MOD_RES (140)..(140): May or may not be conjugated to a chemical probe
  MOD_RES (331)..(331): May or may not be conjugated to a chemical probe
MADYLISGGTSYVPDDGLTAQQLFNCGDGLTYNDFLILPGYIDFTADQVDLTSALTKKITLKTPLVSSPMDTVTEAGMAIAMALTGGIGFIHHNCTPEFQANEVRKVKKYEQGFITDPVVLSPKDRVRDVFEAKARHGFCGIPITDTGRMGSRLVGIISSRDIDFLKEEEHDCFLEEIMTKREDLVVAPAGITLKEANEILQRSKKGKLPIVNEDDELVAIIARTDLKKNRDYPLASKDAKKQLLCGAAIGTHEDDKYRLDLLAQAGVDVVVLDSSQGNSIFQINMIKYIKDKYPNLQVIGGNVVTAAQAKNLIDAGVDALRVGMGSGSICITQEVLACGRPQATAVYKVSEYARRFGVPVIADGGIQNVGHIAKALALGASTVMMGSLLAATTEAPGEYFFSDGIRLKKYRGMGSLDAMDKHLSSQNRYFSEADKIKVAQGVSGAVQDKGSIHKFVPYLIAGIQHSCQDIGAKSLTQVRAMMYSGELKFEKRTSSAQVEGGVHSLHSYEKRLF

SEQ ID NO: 9663 - protein, 270 aa, Homo sapiens
  Table 5 sequence identifier: Q9NQ88_C114, C161
  MOD_RES (114)..(114): May or may not be conjugated to a chemical probe
  MOD_RES (161)..(161): May or may not be conjugated to a chemical probe
MARFALTVVRHGETRFNKEKIIQGQGVDEPLSETGFKQAAAAGIFLNNVKFTHAFSSDLMRTKQTMHGILERSKFCKDMTVKYDSRLRERKYGVVEGKALSELRAMAKAAREECPVFTPPGGETLDQVKMRGIDFFEFLCQLILKEADQKEQFSQGSPSNCLETSLAEIFPLGKNHSSKVNSDSGIPGLAASVLVVSHGAYMRSLFDYFLTDLKCSLPATLSRSELMSVTPNTGMSLFIINFEEGREVKPTVQCICMNLQDHLNGLTETR

SEQ ID NO: 9664 - protein, 706 aa, Homo sapiens
  Table 5 sequence identifier: Q04759_C14, C17
  MOD_RES (14)..(14): May or may not be conjugated to a chemical probe
  MOD_RES (17)..(17): May or may not be conjugated to a chemical probe
MSPFLRIGLSNFDCGSCQSCQGEAVNPYCAVLVKEYVESENGQMYIQKKPTMYPPWDSTFDAHINKGRVMQIIVKGKNVDLISETTVELYSLAERCRKNNGKTEIWLELKPQGRMLMNARYFLEMSDTKDMNEFETEGFFALHQRRGAIKQAKVHHVKCHEFTATFFPQPTFCSVCHEFVWGLNKQGYQCRQCNAAIHKKCIDKVIAKCTGSAINSRETMFHKERFKIDMPHRFKVYNYKSPTFCEHCGTLLWGLARQGLKCDACGMNVHHRCQTKVANLCGINQKLMAEALAMIESTQQARCLRDTEQIFREGPVEIGLPCSIKNEARPPCLPTPGKREPQGISWESPLDEVDKMCHLPEPELNKERPSLQIKLKIEDFILHKMLGKGSFGKVFLAEFKKTNQFFAIKALKKDVVLMDDDVECTMVEKRVLSLAWEHPFLTHMFCTFQTKENLFFVMEYLNGGDLMYHIQSCHKFDLSRATFYAAEIILGLQFLHSKGIVYRDLKLDNILLDKDGHIKIADFGMCKENMLGDAKTNTFCGTPDYIAPEILLGQKYNHSVDWWSFGVLLYEMLIGQSPFHGQDEEELFHSIRMDNPFYPRWLEKEAKDLLVKLFVREPEKRLGVRGDIRQHPLFREINWEELERKEIDPPFRPKVKSPFDCSNFDKEFLNEKPRLSFADRALINSMDQNMFRNFSFMNPGMERLIS

SEQ ID NO: 9665 - protein, 442 aa, Homo sapiens [sequence omitted]

What is claimed is:

1. A method of modulating an immune response in a subject in need thereof, comprising administering to the subject a therapeutically effective amount of a small molecule fragment of Formula (I): [chemical structure]
wherein:
RM is a reactive moiety selected from a Michael acceptor moiety, a leaving group moiety, or a moiety capable of forming a covalent bond with the thiol group of a cysteine residue; and
F is a small molecule fragment moiety.

2. The method of claim 1, wherein the small molecule fragment interacts with an endogenous cysteine-containing polypeptide expressed in the subject to form a cysteine-containing polypeptide-small molecule fragment adduct.

3. The method of claim 1 or 2, wherein the small molecule fragment is covalently bond to a cysteine residue of the cysteine-containing polypeptide.

4. The method of claim 2, wherein the cysteine-containing polypeptide-small molecule fragment adduct induces an immune response.

5. The method of claim 2 or 4, wherein the cysteine-containing polypeptide-small molecule fragment adduct induces a humoral immune response or a cell-mediated immune response.

6. The method of claim 2, wherein the cysteine-containing polypeptide-small molecule fragment adduct increases an immune response relative to a control.

7. The method of claim 6, wherein the control is the level of an immune response in the subject prior to administration of the small molecule fragment or the level of an immune response in a subject who has not been exposed to the small molecule fragment.

8. The method of claim 2, wherein the cysteine-containing polypeptide is overexpressed in a disease or condition.

9. The method of claim 2, wherein the cysteine-containing polypeptide comprises one or more mutations, optionally overexpressed in a disease or condition.

10. The method of claim 8 or 9, wherein the disease or condition is cancer.

11. The method of claim 2, wherein the cysteine-containing polypeptide comprises a biologically active cysteine site, optionally located about 10 Å or less to an active-site ligand or residue.

12. The method of claim 2, wherein the cysteine-containing polypeptide comprises a protein illustrated in Tables 1-6.

13. The method of claim 2, wherein the cysteine-containing polypeptide comprises cereblon.

14. The method of claim 2, wherein the cysteine-containing polypeptide is at most 50 amino acid residues in length.

15. The method of claim 14, wherein the cysteine-containing polypeptide comprises an isolated and purified polypeptide comprising at least 80%, 85%, 90%, 95%, 96%, 9%, 98%, or 99% sequence identity to at least seven contiguous amino acids of an amino acid sequence selected from SEQ ID NOs: 1-9655.

16. The method of claim 1, wherein F is a small molecule fragment moiety illustrated in FIG. 1.

17. An isolated and purified antibody or its binding fragment thereof comprising a heavy chain CDR1, CDR2 and CDR3 sequence and a light chain CDR1, CDR2 and CDR3 sequence, wherein the heavy chain and light chain CDRs interact with a cysteine-containing polypeptide that is covalently bond to a small molecule fragment, wherein the small molecule fragment is a small molecule fragment of Formula (I): [chemical structure]
wherein:
RM is a reactive moiety selected from a Michael acceptor moiety, a leaving group moiety, or a moiety capable of forming a covalent bond with the thiol group of a cysteine residue; and
wherein the small molecule fragment is covalently bond to a cysteine residue of the cysteine-containing polypeptide.

18. The isolated and purified antibody or its binding fragment thereof of claim 17, wherein the antibody or its binding fragment thereof comprises a humanized antibody or binding fragment thereof, chimeric antibody or binding fragment thereof, monoclonal antibody or binding fragment thereof, monovalent Fab′, divalent Fab2, single-chain variable fragment (scFv), diabody, minibody, nanobody, single-domain antibody (sdAb), or camelid antibody or binding fragment thereof.

19. The isolated and purified antibody or its binding fragment thereof of claim 17, wherein F is a small molecule fragment moiety illustrated in FIG. 1.

20. The isolated and purified antibody or its binding fragment thereof of claim 17, wherein the cysteine-containing polypeptide comprises a protein illustrated in Tables 1-6.

21. The isolated and purified antibody or its binding fragment thereof of claim 17, wherein the cysteine-containing polypeptide comprises cereblon.

22. The isolated and purified antibody or its binding fragment thereof of claim 17, wherein the cysteine-containing polypeptide is at most 50 amino acid residues in length.

23. The isolated and purified antibody or its binding fragment thereof of claim 22, wherein the cysteine-containing polypeptide comprises an isolated and purified polypeptide comprising at least 80%, 85%, 90%, 95%, 96%, 97%, 98%, or 99% sequence identity to at least seven contiguous amino acids of an amino acid sequence selected from SEQ ID NOs: 1-9655.

24. A vaccine comprising a small molecule fragment of Formula (I): [chemical structure]
wherein:
RM is a reactive moiety selected from a Michael acceptor moiety, a leaving group moiety, or a moiety capable of forming a covalent bond with the thiol group of a cysteine residue; and
F is a small molecule fragment moiety.

25. The vaccine of claim 24, wherein F is a small molecule fragment moiety illustrated in FIG. 1.

26. A kit comprising an isolated and purified antibody or its binding fragment thereof of claims 17-23, or a vaccine of claims 24-25.

27. A method of modulating cereblon activity, comprising:
contacting a cell expressing cereblon with a small molecule fragment of Formula (I): [chemical structure]
wherein EM is a reactive moiety selected from a Michael acceptor moiety, a leaving group moiety, or a moiety capable of forming a covalent bond with the thiol group of cysteine residue; and F is a small molecule fragment moiety;
wherein the small molecule fragment of Formula (I) covalently binds to residue 187 or residue 288 of cereblon; and
wherein residue positions 187 and 288 correspond to positions 187 and 288 of SEQ ID NO: 9665.

28. The method of claim 27, wherein F is a small molecule fragment moiety illustrated in FIG. 1.

29. The method of claim 27, wherein F optionally comprises a second reactive moiety.

30. The method of claim 27, wherein the cell is a mammalian cell.

31. The method of claim 27, wherein the method is an in vivo method.
